(19) United States
(12) Patent Application Publication
(10) Pub. No.: US 2024/0299583 A1
(43) Pub. Date: Sep. 12, 2024

(54) Modified Guide RNAs for Gene Editing

(71) Applicant: Intellia Therapeutics, Inc., Cambridge, MA (US)

(72) Inventors: Sabin Mulepati, Somerville, MA (US); Lindsey Jean Stretz, Cambridge, MA (US); Michelle Young, Cambridge, MA (US); Sung Hee Choi, Cambridge, MA (US); Rubina Giare Parmar, Acton, MA (US); Weijun Chen, Shrewsbury, MA (US); Eun Soo Yoon, Cambridge, MA (US)

(73) Assignee: Intellia Therapeutics, Inc., Cambridge, MA (US)

(21) Appl. No.: 18/652,176

(22) Filed: May 1, 2024

Related U.S. Application Data
(63) Continuation of application No. PCT/US2022/079121, filed on Nov. 2, 2022.
(60) Provisional application No. 63/352,161, filed on Jun. 14, 2022.
(60) Provisional application No. 63/275,426, filed on Nov. 3, 2021.

(51) Int. Cl. A61K 48/00; C12N 9/22; C12N 9/78; C12N 15/11; C12N 15/88; C12N 15/90

(52) U.S. Cl. CPC A61K 48/005; C12N 9/22; C12N 9/78; C12N 15/11; C12N 15/88; C12N 15/907; C12Y 305/04005; C12N 2310/20; C12N 2310/531

(57) ABSTRACT

This disclosure relates to modified guide RNAs having improved in vitro and in vivo activity in gene editing methods. This disclosure also relates to N. meningitidis Cas9 (NmeCas9) gene editing systems with modified guide RNAs.

[0001] This application is a Continuation of International Application No. PCT/US2022/079121 filed on Nov. 2, 2022, which claims the benefit of priority to U.S. Provisional Application No. 63/275,426 filed on Nov. 3, 2021, and U.S. Provisional Application No. 63/352,161 filed on Jun. 14, 2022, the contents all of which are incorporated by reference in their entirety.

[0002] The instant application contains a Sequence Listing which has been submitted electronically in XML format and is hereby incorporated by reference in its entirety. Said XML copy, created on Nov. 1, 2022, is named 01155-0048-00PCT_ST26 and is 1,429,694 bytes in size.

[0003] This disclosure relates to the field of gene editing using CRISPR/Cas9 systems, a part of the prokaryotic immune system that recognizes and cuts exogenous genetic elements.

[0004] The CRISPR/Cas9 system relies on a single nuclease, termed CRISPR-associated protein 9 (Cas9), which induces site-specific breaks in DNA. Cas9 is guided to specific DNA sequences by small RNA molecules termed guide RNA (gRNA). A complete guide RNA comprises tracrRNA (trRNA) and crisprRNA (crRNA). A crRNA comprising a guide region may also be referred to as a gRNA, with the understanding that to form a complete gRNA it should be or become associated covalently or noncovalently with a trRNA. The trRNA and crRNA may be contained within a single guide RNA (sgRNA) or in two separate RNA molecules of a dual guide RNA (dgRNA). Cas9 in combination with gRNA is termed the Cas9 ribonucleoprotein complex (RNP).

[0005] CRISPR/Cas9 systems exist in various bacterial species, and can have different properties, including with respect to gRNA length and degree of sequence-specificity in cleavage. Neisseria meningitidis Cas9 (NmeCas9) has an advantageously low off-target cleavage rate but uses relatively long gRNAs, which complicates in vitro gRNA synthesis.

[0006] Oligonucleotides, and in particular RNA, are sometimes degraded in cells and in serum by non-enzymatic, endonuclease or exonuclease cleavage. Oligonucleotides can be synthesized with modifications at various positions to reduce or prevent such degradation. Given the cyclic nature and imperfect yield of oligonucleotide synthesis, shortening the gRNA while retaining or even improving its activity would be desirable, e.g., so that the gRNA can be obtained in greater yield, or compositions comprising the gRNA have greater homogeneity or fewer incomplete or erroneous products. Additionally, improved methods and compositions for preventing such degradation, improving stability of gRNAs and enhancing gene editing efficiency is desired, especially for therapeutic applications. The present disclosure aims to meet one or more of these needs, provide other benefits, or at least provide the public with a useful choice.

### SUMMARY

[0007] The present disclosure relates to gene editing using Neisseria meningitidis CRISPR/Cas9 systems. NmeCas9 is smaller than Streptococcus pyogenes Cas9 (SpyCas9), allowing NmeCas9 to be suitable for messenger RNA (mRNA)-based delivery methods. However, NmeCas9 forms an RNP with a gRNA that is longer than a SpyCas9 guide RNA. Conventionally used gRNA for NmeCas9 has a length of 145 or more nucleotides (Ibraheim et al. Genome Biology (2018) 19:137) and shortening the gRNA while retaining or even improving its activity would be desirable for preventing degradation and improving stability of gRNAs and enhancing gene editing efficiency.

[0008] In some embodiments, genome editing tools are provided comprising guide RNA (gRNA) with one or more shortened regions as described herein. The shortened regions described herein may facilitate synthesis of the gRNA with greater yield or homogeneity, or may improve the stability of the gRNA and the gRNA/Cas9 complex, or improve the activity of Cas9 to cleave target DNA.

[0009] In some embodiments, crisprRNA (crRNA) or tracrRNA (trRNA) with one or more shortened regions or substitutions as described herein are provided. In some embodiments, a dual guide RNA (dgRNA) comprises the modified crRNA or modified trRNA. In some embodiments, a single guide RNA (sgRNA) comprises the modified crRNA or modified trRNA. The shortened regions or substitutions described herein may facilitate synthesis of the gRNA with greater yield or homogeneity or may improve the stability of the gRNA and the gRNA/Cas9 complex, or improve the activity of NmeCas9 to cleave target DNA. Compared to NmeCas9 145-mer sgRNAs, synthesis of the presently disclosed gRNAs may increase crude yield of a gRNA. Similarly, gRNA sample purity as measured by the proportion of full length product, e.g., crude purity, can be increased. Guide RNA can be obtained in greater yield, or compositions comprising the gRNA can have greater homogeneity or fewer incomplete or erroneous products. Guide RNA purity may be assessed using ion-pair reversed-phase high performance liquid chromatography (IP-RP-HPLC) and ion exchange HPLC methods, e.g., as in Kanavarioti et al, Sci Rep 9, 1019 (2019) (doi:10.1038/s41598-018-37642-z). Using UV spectroscopy at a wavelength of 260 nm, crude purity and final purity can be determined by the ratio of absorbance of the main peak to the cumulative absorbance of all peaks in the chromatogram. Synthetic yield is determined as the ratio of the absorbance at 260 nm of the final sample compared to the theoretical absorbance of input materials.

[0010] The following embodiments are encompassed.

[0011] In some embodiments, a guide RNA (gRNA) is provided, the guide RNA comprising a guide region and a conserved region, the conserved region comprising one or more of:
[0012] (a) a shortened repeat/anti-repeat region, wherein the shortened repeat/anti-repeat region lacks 2-24 nucleotides, wherein
   [0013] (i) one or more of nucleotides 37-48 and 53-64 is deleted and optionally one or more of nucleotides 37-64 is substituted relative to SEQ ID NO: 500; and
   [0014] (ii) nucleotide 36 is linked to nucleotide 65 by at least 2 nucleotides; or
[0015] (b) a shortened hairpin 1 region, wherein the shortened hairpin 1 lacks 2-10, optionally 2-8 nucleotides, wherein
   [0016] (i) one or more of nucleotides 82-86 and 91-95 is deleted and optionally one or more of positions 82-96 is substituted relative to SEQ ID NO: 500; and
   [0017] (ii) nucleotide 81 is linked to nucleotide 96 by at least 4 nucleotides; or
[0018] (c) a shortened hairpin 2 region, wherein the shortened hairpin 2 lacks 2-18, optionally 2-16 nucleotides, wherein
   [0019] (i) one or more of nucleotides 113-121 and 126-134 is deleted and optionally one or more of nucleotides 113-134 is substituted relative to SEQ ID NO: 500; and
   [0020] (ii) nucleotide 112 is linked to nucleotide 135 by at least 4 nucleotides;
[0021] wherein one or both nucleotides 144-145 are optionally deleted relative to SEQ ID NO: 500;
[0022] wherein at least 10 nucleotides are modified nucleotides.

[0023] In some embodiments, a guide RNA (gRNA) is provided, the guide RNA comprising a guide region and a conserved region, the conserved region comprising one or more of:
[0024] (a) a shortened repeat/anti-repeat region, wherein the shortened repeat/anti-repeat region lacks 18-22 nucleotides relative to SEQ ID NO: 500, wherein
   [0025] (i) nucleotides 37-48 and 53-64 are deleted; and
   [0026] (ii) nucleotide 36 is linked to nucleotide 65 by 6-10 nucleotides; or
[0027] (b) a shortened hairpin 1 region, wherein the shortened hairpin 1 lacks 2 nucleotides, wherein nucleotides 86 and 91 are deleted or nucleotides 85 and 92 are deleted relative to SEQ ID NO: 500; or
[0028] (c) a shortened hairpin 2 region, wherein the shortened hairpin 2 lacks 18 nucleotides, wherein nucleotides 113-121 and 126-134 are deleted relative to SEQ ID NO: 500; and
[0029] wherein nucleotides 144-145 are deleted relative to SEQ ID NO: 500;
[0030] wherein at least 10 nucleotides are modified nucleotides.

[0031] The guide RNA (gRNA) of the previous embodiment comprising a guide region and a conserved region, the conserved region comprising:
[0032] (a) a shortened repeat/anti-repeat region, wherein the shortened repeat/anti-repeat region lacks 18-22 nucleotides, wherein
   [0033] (i) nucleotides 37-48 and 53-64 are deleted relative to SEQ ID NO: 500; and
   [0034] (ii) nucleotide 36 is linked to nucleotide 65 by 6-10 nucleotides;
[0035] (b) a shortened hairpin 1 region, wherein the shortened hairpin 1 lacks 2 nucleotides relative to SEQ ID NO: 500, wherein nucleotides 86 and 91 are deleted or nucleotides 85 and 92 are deleted;
[0036] (c) a shortened hairpin 2 region, wherein the shortened hairpin 2 lacks 18 nucleotides, wherein nucleotides 113-121 and 126-134 are deleted relative to SEQ ID NO: 500; and
[0037] (d) wherein nucleotides 144-145 are deleted relative to SEQ ID NO: 500;
[0038] wherein at least 10 nucleotides are modified nucleotides.

[0039] In further embodiments, the shortened repeat/anti-repeat region, wherein the shortened repeat/anti-repeat region lacks 22 nucleotides relative to SEQ ID NO: 500. In further embodiments, nucleotide 36 is linked to nucleotide 65 by a sequence comprising the nucleotide sequence UGAAAC. In further embodiments, nucleotide 36 is linked to nucleotide 65 by 10 nucleotides. In further embodiments, the nucleotide 36 is linked to nucleotide 65 by a sequence comprising the nucleotide sequence UUCGAAAGAC (SEQ ID NO: 950).

[0040] In some embodiments, the gRNA comprises a 5′ end modification. In some embodiments, the gRNA comprises a 3′ end modification. In some embodiments, the gRNA comprises a 5′ end modification and a 3′ end modification. In some embodiments, the gRNA comprises a modification in the upper stem region of the repeat/anti-repeat region. In some embodiments, the gRNA comprises a modification in the hairpin 1 region. In some embodiments, the gRNA comprises a modification in the hairpin 2 region.

[0041] In some embodiments, any of the foregoing modification is a modified nucleotide is selected from 2′-O-methyl (2′-OMe) modified nucleotide, 2′-O-(2-methoxyethyl) (2′-O-moe) modified nucleotide, a 2′-fluoro (2′-F) modified nucleotide, a phosphorothioate (PS) linkage between nucleotides, or an inverted abasic modified nucleotide, optionally wherein the gRNA comprises at least two modifications independently selected from a 2′-O-methyl (2′-OMe) modified nucleotide, 2′-O-(2-methoxyethyl) (2′-O-moe) modified nucleotide, a 2′-fluoro (2′-F) modified nucleotide, a phosphorothioate (PS) linkage between nucleotides, and an inverted abasic modified nucleotide.

[0042] In some embodiments, the 5′ end modification comprises a modified nucleotide selected from (i) 2′-O-methyl (2′-OMe) modified nucleotide, (ii) 2′-O-(2-methoxyethyl) (2′-O-moe) modified nucleotide, (iii) a 2′-fluoro (2′-F) modified nucleotide, (iv) a phosphorothioate (PS) linkage between nucleotides, or (v) an inverted abasic modified nucleotide, optionally, wherein the gRNA comprises at least two 5′ end modifications independently selected from (i)-(v).

[0043] In some embodiments, the 3′ end modification comprises a modified nucleotide selected from (i) 2′-O-methyl (2′-OMe) modified nucleotide, (ii) 2′-O-(2-methoxyethyl) (2′-O-moe) modified nucleotide, (iii) a 2′-fluoro (2′-F) modified nucleotide, (iv) a phosphorothioate (PS) linkage between nucleotides, or (v) an inverted abasic modified nucleotide, optionally, wherein the gRNA comprises at least two 3′ end modifications independently selected from (i)-(v).

[0044] In some embodiments, the 5′ end modification comprises:
[0045] i. a modification of one or more of the first 1-4 nucleotides, wherein the modification is a PS linkage, inverted abasic nucleotide, 2′-OMe, 2′-O-moe, or 2′-F;
[0046] ii. a modification to the first nucleotide with 2′-OMe, 2′-O-moe, or 2′-F, and an optional one or two PS linkages to the next nucleotide or the first nucleotide of the 3′ tail;
[0047] iii. a modification to the first or second nucleotide with 2′-OMe, 2′-O-moe, or 2′-F, and optionally one or more PS linkages;
[0048] iv. a modification to the first, second, or third nucleotides with 2′-OMe, 2′-O-moe, or 2′-F, and optionally one or more PS linkages; or
[0049] v. a modification to the first, second, third, or forth nucleotides with 2′-OMe, 2′-O-moe, or 2′-F, and optionally one or more PS linkages,
   optionally, wherein the gRNA comprises at least two 5′ end modifications independently selected from (i)-(v).

[0050] The gRNA of any one of the preceding claims, wherein the 3′ end modification comprises:
[0051] i. a modification of one or more of the last 1-4 nucleotides, wherein the modification is a PS linkage, inverted abasic nucleotide, 2′-OMe, 2′-O-moe, or 2′-F;
[0052] ii. a modification to the last nucleotide with 2′-OMe, 2′-O-moe, or 2′-F, and an optional one or two PS linkages to the next nucleotide or the first nucleotide of the 3′ tail;
[0053] iii. a modification to the last or second to last nucleotide with 2′-OMe, 2′-O-moe, or 2′-F, and optionally one or more PS linkages;
[0054] iv. a modification to the last, second to last, or third to last nucleotides with 2′-OMe, 2′-O-moe, or 2′-F, and optionally one or more PS linkages; or
[0055] v. a modification to the last, second to last, third to last, or fourth to last nucleotides with 2′-OMe, 2′-O-moe, or 2′-F, and optionally one or more PS linkages,
   optionally wherein the gRNA comprises at least two 3′ end modifications independently selected from (i)-(v).

[0056] In some embodiments, the modification in the repeat/anti-repeat region, the hairpin 1 region, or the hairpin 2 region comprises a modified nucleotide selected from (i) 2′-O-methyl (2′-OMe) modified nucleotide, (ii) 2′-O-(2-methoxyethyl) (2′-O-moe) modified nucleotide, (iii) a 2′-fluoro (2′-F) modified nucleotide, or (iv) a phosphorothioate (PS) linkage between nucleotides, optionally wherein the modification in the repeat/anti-repeat region, the hairpin 1 region, or the hairpin 2 region comprises at least two modifications independently selected from (i)-(iv).

[0057] In some embodiments, the modification in the repeat/anti-repeat region, the hairpin 1 region, or the hairpin 2 region comprises a modified nucleotide selected from (i) 2′-O-methyl (2′-OMe) modified nucleotide, (ii) a 2′-fluoro (2′-F) modified nucleotide, or (iii) a phosphorothioate (PS) linkage between nucleotides, optionally wherein the repeat/anti-repeat region, the hairpin 1 region, or the hairpin 2 region comprises at least two modifications independently selected from (i)-(iii).

[0058] In some embodiments, the modification in the repeat/anti-repeat region, the hairpin 1 region, or the hairpin 2 region comprises a modified nucleotide selected from (i) 2′-O-methyl (2′-OMe) modified nucleotide, or (ii) a phosphorothioate (PS) linkage between nucleotides, optionally wherein the repeat/anti-repeat region, the hairpin 1 region, or the hairpin 2 region comprises at least two modifications independently selected from (i) and (ii).

[0059] In some embodiments, a composition comprising a gRNA associated with a lipid nanoparticle (LNP) disclosed herein is provided. In some embodiments, an LNP composition comprising a gRNA disclosed herein is provided. In some embodiments, the composition further comprises a nuclease or an mRNA which encodes the nuclease.

[0060] The following additional embodiments are provided herein.

[0061] Embodiment 1 is a guide RNA (gRNA) comprising a guide region and a conserved region, the conserved region comprising one or more of:
[0062] (a) a shortened repeat/anti-repeat region, wherein the shortened repeat/anti-repeat region lacks 2-24 nucleotides, wherein
   [0063] (i) one or more of nucleotides 37-48 and 53-64 is deleted and optionally one or more of nucleotides 37-64 is substituted relative to SEQ ID NO: 500; and
   [0064] (ii) nucleotide 36 is linked to nucleotide 65 by at least 2 nucleotides; or
[0065] (b) a shortened hairpin 1 region, wherein the shortened hairpin 1 lacks 2-10, optionally 2-8 nucleotides, wherein
   [0066] (i) one or more of nucleotides 82-86 and 91-95 is deleted and optionally one or more of positions 82-96 is substituted relative to SEQ ID NO: 500; and
   [0067] (ii) nucleotide 81 is linked to nucleotide 96 by at least 4 nucleotides; or
[0068] (c) a shortened hairpin 2 region, wherein the shortened hairpin 2 lacks 2-18, optionally 2-16 nucleotides, wherein
   [0069] (i) one or more of nucleotides 113-121 and 126-134 is deleted and optionally one or more of nucleotides 113-134 is substituted relative to SEQ ID NO: 500; and
   [0070] (ii) nucleotide 112 is linked to nucleotide 135 by at least 4 nucleotides;
[0071] wherein one or both nucleotides 144-145 are optionally deleted relative to SEQ ID NO: 500;
[0072] wherein at least 10 nucleotides are modified nucleotides.

[0073] Embodiment 2 is the gRNA of Embodiment 1, wherein the gRNA is a single-guide RNA (sgRNA) and wherein the gRNA comprises (a) a shortened repeat/anti-repeat region, wherein the shortened repeat/anti-repeat region lacks 2-24 nucleotides, wherein
[0074] (i) one or more of nucleotides 37-48 and 53-64 is deleted and optionally one or more of nucleotides 37-64 is substituted relative to SEQ ID NO: 500; and
[0075] (ii) nucleotide 36 is linked to nucleotide 65 by at least 2 nucleotides.

[0076] Embodiment 3 is the gRNA of Embodiment 1 or 2, wherein the guide region has (i) an insertion of one nucleotide or a deletion of 1-4 nucleotides within positions 1-24 relative to SEQ ID NO: 500, or (ii) a length of 24 nucleotides.

[0077] Embodiment 4 is the gRNA of Embodiment 3, wherein the guide region has a length of 25, 24, 23, 22, 21, or 20 nucleotides, optionally wherein the guide region has a length of 25, 24, 23, or 22 nucleotides.

[0078] Embodiment 5 is the gRNA of Embodiment 4, wherein the guide region has a length of 23-24 nucleotides.

[0079] Embodiment 6 is the gRNA of any one of Embodiments 1-5, wherein the gRNA further comprises a 3′ tail.

[0080] Embodiment 7 is the gRNA of Embodiment 6, wherein the 3′ tail comprises 1, 2, 3, 4, 5, 6, 7, 8, 9, or 10 nucleotides.

[0081] Embodiment 8 is the gRNA of Embodiment 7, wherein the 3′ tail comprises 1, 2, 3, 4, or 5 nucleotides.

[0082] Embodiment 9 is the gRNA of any one of Embodiments 6-8, wherein the 3′ tail terminates with a nucleotide comprising a uracil or modified uracil.

[0083] Embodiment 10 is the gRNA of any one of Embodiments 6-9, wherein the 3′ tail is 1 nucleotide in length.

[0084] Embodiment 11 is the gRNA of any one of Embodiments 6-10, wherein the 3′ tail consists of a nucleotide comprising a uracil or a modified uracil.

[0085] Embodiment 12 is the gRNA of any one of Embodiments 6-11, wherein the 3′ tail comprises a modification of any one or more of the nucleotides present in the 3′ tail.

[0086] Embodiment 13 is the gRNA of any one of Embodiments 6-12, wherein the modification of the 3′ tail is one or more of 2′-O-methyl (2′-OMe) modified nucleotide and a phosphorothioate (PS) linkage between nucleotides.

[0087] Embodiment 14 is the gRNA of any one of Embodiments 6-13, wherein the 3′ tail is fully modified.

[0088] Embodiment 15 is the gRNA of any one of Embodiments 1-14, wherein the 3′ nucleotide of the gRNA is a nucleotide comprising a uracil or a modified uracil.

[0089] Embodiment 16 is the gRNA of any one of Embodiments 1-5, wherein one or more of nucleotides 144 and 145 are deleted relative to SEQ ID NO: 500.

[0090] Embodiment 17 is the gRNA of any one of Embodiments 1-5, wherein both nucleotides 144 and 145 are deleted relative to SEQ ID NO: 500.

[0091] Embodiment 18 is the gRNA of any one of Embodiments 1-5, wherein the gRNA does not comprise a 3′ tail.

[0092] Embodiment 19 is the gRNA of any one of Embodiments 1-18, wherein the shortened repeat/anti-repeat region lacks 2-24 nucleotides.

[0093] Embodiment 20 is the gRNA of any one of Embodiments 1-19, wherein the shortened repeat/anti-repeat region has a length of 28, 29, 30, 31, 32, 33, 34, 35, 36, 37, 38, 39, 40, 41, 42, 43, 44, 45, 46, 47, 48, 49, or 50 nucleotides.

[0094] Embodiment 21 is the gRNA of any one of Embodiments 1-20, wherein the shortened repeat/anti-repeat region lacks 12-24, optionally 18-24 nucleotides, optionally 20-22 nucleotides.

[0095] Embodiment 22 is the gRNA of any one of Embodiments 1-21, wherein the shortened repeat/anti-repeat region has a length of 28, 29, 30, 31, 32, 33, 34, 35, 36, 37, 38, 39, or 40 nucleotides.

[0096] Embodiment 23 is the gRNA of any one of Embodiments 1-22, wherein the shortened repeat/anti-repeat region has a length of 28, 29, 30, 31, 32, 33, or 34 nucleotides, or 30, 31, or 32 nucleotides.

[0097] Embodiment 24 is the gRNA of any one of Embodiments 1-23, wherein nucleotides 37-64 of SEQ ID NO: 500 form the upper stem, and one or more base pairs of the upper stem of the shortened repeat/anti-repeat region are deleted.

[0098] Embodiment 25 is the gRNA of any one of Embodiments 1-24, wherein the upper stem of the shortened repeat/anti-repeat region comprises no more than one, two, three, or four base pairs.

[0099] Embodiment 26 is the gRNA of any one of Embodiments 1-25, wherein all of positions 39-48 and all of positions 53-62 of the upper stem of the shortened repeat/anti-repeat region are deleted, and optionally nucleotide 38 or 63 is substituted.

[0100] Embodiment 27 is the gRNA of any one of Embodiments 1-26, wherein all of positions 38-48 and all of positions 53-63 of the upper stem of the shortened repeat/anti-repeat region are deleted, and optionally nucleotide 37 or 64 is substituted.

[0101] Embodiment 28 is the gRNA of any one of Embodiments 1-27, wherein all of nucleotides 37-48 and 53-64 of the upper stem of the shortened repeat/anti-repeat region are deleted, and optionally nucleotides 36 or 65 is substituted.

[0102] Embodiment 29 is the Grna of any one of Embodiments 1-28, wherein the shortened repeat/anti-repeat region has a duplex portion 11 base paired nucleotides in length.

[0103] Embodiment 30 is the gRNA of any one of Embodiments 1-29, wherein the shortened repeat/anti-repeat region has a single duplex portion.

[0104] Embodiment 31 is the gRNA of any one of Embodiments 1-29, wherein the shortened repeat/anti-repeat region has a first duplex portion and a second duplex portion.

[0105] Embodiment 32 is the gRNA of Embodiment 31, wherein the second duplex portion is 2-3 base paired nucleotides in length.

[0106] Embodiment 33 is the gRNA of Embodiment 31, wherein the first duplex portion is 11 base paired nucleotides in length and the second duplex portion is 3 base paired nucleotides in length.

[0107] Embodiment 34 is the gRNA of any one of Embodiments 1-33, wherein the upper stem of the shortened repeat/anti-repeat region includes one or more substitutions relative to SEQ ID NO: 500.

[0108] Embodiment 35 is the gRNA of any one of Embodiments 1-34, wherein one or more of nucleotides 49-52 is substituted relative to SEQ ID NO: 500.

[0109] Embodiment 36 is the gRNA of any one of Embodiments 1-33, wherein the shortened repeat/anti-repeat region is unsubstituted.

[0110] Embodiment 37 is the gRNA of any one of Embodiments 1-36, wherein the shortened repeat/anti-repeat region has 12-22 modified nucleotides

[0111] Embodiment 38 is the gRNA of Embodiment 37, wherein the shortened repeat/anti-repeat region does not comprise a modification at nucleotide 76.

[0112] Embodiment 39 is the gRNA of Embodiment 37, wherein the shortened repeat/anti-repeat does not comprise a phosphorothioate (PS) modification at nucleotide 76.

[0113] Embodiment 40 is the gRNA of any one of Embodiments 1-39, wherein the shortened hairpin 1 region lacks 2-10 nucleotides, optionally 2-8 or 2-4 nucleotides.

[0114] Embodiment 41 is the gRNA of any one of Embodiments 1-40, wherein the shortened hairpin 1 region has a length of 13, 14, 15, 16, 17, 18, 19, 20, or 21 nucleotides.

[0115] Embodiment 42 is the gRNA of Embodiment any one of Embodiments 1-41, wherein the shortened hairpin 1 region has a duplex portion 4-8, optionally 7-8 base paired nucleotides in length.

[0116] Embodiment 43 is the gRNA of Embodiment any one of Embodiments 1-41, wherein the shortened hairpin 1 region has a single duplex portion.

[0117] Embodiment 44 is the gRNA of any one of Embodiments 1-43, wherein one or two base pairs of the shortened hairpin 1 region are deleted.

[0118] Embodiment 45 is the gRNA of any one of Embodiments 1-44, wherein the stem of the shortened hairpin 1 region is seven or eight base paired nucleotides in length.

[0119] Embodiment 46 is the gRNA of any one of Embodiments 1-45, wherein one or more of positions 85-86 and one or more of nucleotides 91-92 of the shortened hairpin 1 region are deleted.

[0120] Embodiment 47 is the gRNA of any one of Embodiments 1-46, wherein nucleotides 86 and 91 or nucleotides 85 and 92 of the shortened hairpin 1 region are deleted.

[0121] Embodiment 48 is the gRNA of any one of Embodiments 1-47, wherein one or more of nucleotides 82-95 of the shortened hairpin 1 region is substituted relative to SEQ ID NO: 500.

[0122] Embodiment 49 is the gRNA of any one of Embodiments 1-48, wherein one or more of nucleotides 87-90 is substituted relative to SEQ ID NO: 500.

[0123] Embodiment 50 is the gRNA of any one of Embodiments 1-48, wherein the shortened hairpin 1 region is unsubstituted.

[0124] Embodiment 51 is the gRNA of any one of Embodiments 1-49, wherein the shortened hairpin 1 region has 6-15 modified nucleotides.

[0125] Embodiment 52 is the gRNA of any one of Embodiments 1-50, wherein the shortened hairpin 2 region lacks 2-18, optionally 2-16 nucleotides.

[0126] Embodiment 53 is the gRNA of any one of Embodiments 1-51, wherein the shortened hairpin 2 region has a length of 24, 25, 26, 27, 28, 29, 30, 31, 32, 33, 34, 35, 36, 37, 38, 39, or 40 nucleotides.

[0127] Embodiment 54 is the gRNA of any one of Embodiments 1-52, wherein the shortened hairpin 2 region has a length of 28, 29, 30, 31, 32, 33, or 34 nucleotides.

[0128] Embodiment 55 is the gRNA of any one of Embodiments 1-53, wherein one or more of nucleotides 113-121 and one or more of nucleotides 126-134 of the shortened hairpin 2 region are deleted.

[0129] Embodiment 56 is the gRNA of any one of Embodiments 1-54, wherein the shortened hairpin 2 region comprises an unpaired region.

[0130] Embodiment 57 is the gRNA of any one of Embodiments 1-55, wherein the shortened hairpin 2 region has two duplex portions.

[0131] Embodiment 58 is the gRNA of any one of Embodiments 1-56, wherein the shortened hairpin 2 region has a duplex portion of 4 base paired nucleotides in length.

[0132] Embodiment 59 is the gRNA of any one of Embodiments 57-58, wherein the shortened hairpin 2 region has a duplex portion of 4-8 base paired nucleotides in length.

[0133] Embodiment 60 is the gRNA of any one of Embodiments 57-59, wherein the shortened hairpin 2 region has a duplex portion of 4-6 base paired nucleotides in length.

[0134] Embodiment 61 is the gRNA of any one of Embodiments 1-60, wherein nucleotides 109-138 of SEQ ID NO: 500 form the upper stem, and the upper stem of the shortened hairpin 2 region comprises one, two, three, or four base pairs.

[0135] Embodiment 62 is the gRNA of any one of Embodiments 1-61, wherein at least one pair of nucleotides 113 and 134, nucleotides 114 and 133, nucleotides 115 and 132, nucleotides 116 and 131, nucleotides 117 and 130, nucleotides 118 and 129, nucleotides 119 and 128, nucleotides 120 and 127, and nucleotides 121 and 126 are deleted.

[0136] Embodiment 63 is the gRNA of any one of Embodiments 1-62, wherein all of positions 113-121 and 126-134 of the shortened hairpin 2 region are deleted.

[0137] Embodiment 64 is the gRNA of any one of Embodiments 1-63, wherein one or more of nucleotides 113-134 of the shortened hairpin 2 region is substituted relative to SEQ ID NO: 500.

[0138] Embodiment 65 is the gRNA of any one of Embodiments 1-64, wherein one or more of nucleotides 122-125 is substituted relative to SEQ ID NO: 500.

[0139] Embodiment 66 is the gRNA of any one of Embodiments 1-64, wherein the shortened hairpin 2 region is unsubstituted.

[0140] Embodiment 67 is the gRNA of Embodiment any one of Embodiments 1-66, wherein the shortened hairpin 2 region has 6-15 modified nucleotides.

[0141] Embodiment 68 is the gRNA of any one of Embodiments 1-67, wherein the guide region of the gRNA comprises at least two modified nucleotides, optionally at least four modified nucleotides.

[0142] Embodiment 69 is the gRNA of any one of Embodiments 1-68, wherein the guide region of the gRNA comprises 1, 2, 3, 4, 5, 6, 7, 8, 9, 10, 11, or 12 modified nucleotides, optionally 1, 2, or 3 modified nucleotides.

[0143] Embodiment 70 is the gRNA of any one of Embodiments 1-69, wherein the guide region of the gRNA comprises 4, 5, 6, 7, 8, 9, 10, 11, or 12 modified nucleotides.

[0144] Embodiment 71 is the gRNA of any one of Embodiments 1-70, wherein the guide region of the gRNA comprises 6, 7, 8, 9, 10, 11, or 12 modified nucleotides.

[0145] Embodiment 72 is the gRNA of any one of Embodiments 1-71, wherein the guide region does not comprise a modified nucleotide 3′ of the first three nucleotides of the guide region.

[0146] Embodiment 73 is the gRNA of any one of Embodiments 1-66, wherein the guide region does not comprise a modified nucleotide.

[0147] Embodiment 74 is the gRNA of any one of Embodiments 1-72, wherein the gRNA comprises a 5′ end modification.

[0148] Embodiment 75 is the gRNA of any one of Embodiments 1-74, wherein the gRNA comprises a 3′ end modification.

[0149] Embodiment 76 is the gRNA of any one of Embodiments 1-75, wherein the gRNA comprises a 5′ end modification and a 3′ end modification.

[0150] Embodiment 77 is the gRNA of any one of Embodiments 1-76, comprising a modification in the upper stem region of the repeat/anti-repeat region.

[0151] Embodiment 78 is the gRNA of any one of Embodiments 1-77, comprising a modification in the hairpin 1 region.

[0152] Embodiment 79 is the gRNA of any one of Embodiments 1-78, comprising a modification in the hairpin 2 region.

[0153] Embodiment 80 is the gRNA of Embodiment 79, wherein the modification in the hairpin 2 region comprises a modification at 1, 2, 3, or 4 nucleotides of nucleotides 106-109.

[0154] Embodiment 81 is the gRNA of Embodiment 80, wherein the modification in the hairpin 2 region comprises a modification at each of nucleotides 106-109.

[0155] Embodiment 82 is the gRNA of any one of Embodiments 80 or 81, wherein the modification comprises a 2′-O-methyl (2′-O-Me) modification.

[0156] Embodiment 83 is the gRNA of any one of Embodiments 1-82, comprising a 3′ end modification, and comprising a modification in the upper stem region of the repeat/anti-repeat region.

[0157] Embodiment 84 is the gRNA of any one of Embodiments 1-83, comprising a 3′ end modification, and a modification in the hairpin 1 region.

[0158] Embodiment 85 is the gRNA of any one of Embodiments 1-83, comprising a 3′ end modification, and a modification in the hairpin 2 region.

[0159] Embodiment 86 is the gRNA of any one of Embodiments 1-85, comprising a 5′ end modification, and comprising a modification in the upper stem region of the repeat/anti-repeat region.

[0160] Embodiment 87 is the gRNA of any one of Embodiments 1-86, comprising a 5′ end modification, and a modification in the hairpin 1 region.

[0161] Embodiment 88 is the gRNA of any one of Embodiments 1-87, comprising a 5′ end modification, and a modification in the hairpin 2 region.

[0162] Embodiment 89 is the gRNA of any one of Embodiments 1-88, comprising a 5′ end modification, a modification in the upper stem region of the repeat/anti-repeat region, and a 3′ end modification.

[0163] Embodiment 90 is the gRNA of any one of Embodiments 1-89, comprising a 5′ end modification, a modification in the hairpin 1 region, and a 3′ end modification.

[0164] Embodiment 91 is the gRNA of any one of Embodiments 1-90, comprising a 5′ end modification, a modification in the hairpin 1 region, a modification in the hairpin 2 region, and a 3′ end modification.

[0165] Embodiment 92 is the gRNA of any one of Embodiments 1-91, comprising a 5′ end modification, a modification in the repeat/anti-repeat region, a modification in the hairpin 1 region, a modification in the hairpin 2 region, and a 3′ end modification.

[0166] Embodiment 93 is the gRNA of any one of Embodiments 1-92, wherein the modification in the repeat/anti-repeat region does not comprise a phosphorothioate (PS) modification at nucleotide 76.

[0167] Embodiment 94 is the gRNA of any one of Embodiments 1-93, wherein the modification in the repeat/anti-repeat region does not comprise a modification at nucleotide 76.

[0168] Embodiment 95 is the gRNA of any one of Embodiments 74-94, wherein the 5′ end modification comprises a modified nucleotide selected from a 2′-O-methyl (2′-OMe) modified nucleotide, 2′-O-(2-methoxyethyl) (2′-O-moe) modified nucleotide, a 2′-fluoro (2′-F) modified nucleotide, a phosphorothioate (PS) linkage between nucleotides, or an inverted abasic modified nucleotide.

[0169] Embodiment 96 is the gRNA of any one of the Embodiments 74-95, wherein the 3′ end modification comprises a modified nucleotide selected from a 2′-O-methyl (2′-OMe) modified nucleotide, 2′-O-(2-methoxyethyl) (2′-O-moe) modified nucleotide, a 2′-fluoro (2′-F) modified nucleotide, a phosphorothioate (PS) linkage between nucleotides, or an inverted abasic modified nucleotide.

[0170] Embodiment 97 is the gRNA of any one of the Embodiments 74-96, wherein the 5′ end modification comprises any of.
[0171] i, a modification of any one or more of the first 1, 2, 3, or 4 nucleotides;
[0172] ii. one modified nucleotide;
[0173] iii. two modified nucleotides;
[0174] iv. three modified nucleotides; and
[0175] v. four modified nucleotides.

[0176] Embodiment 98 is the gRNA of any one of Embodiments 74-97, wherein the 5′ end modification comprises one or more of:
[0177] i. a phosphorothioate (PS) linkage between nucleotides;
[0178] ii. a 2′-OMe modified nucleotide;
[0179] iii. a 2′-O-moe modified nucleotide;
[0180] iv. a 2′-F modified nucleotide; and
[0181] v. an inverted abasic modified nucleotide.

[0182] Embodiment 99 is the gRNA of any one of Embodiments 74-98, wherein the 3′ end modification comprises any of:
[0183] i. a modification of any one or more of the last 4, 3, 2, or 1 nucleotides;
[0184] ii. one modified nucleotide;
[0185] iii. two modified nucleotides;
[0186] iv. three modified nucleotides; and
[0187] v. four modified nucleotides.

[0188] Embodiment 100 is the gRNA of any one of Embodiments 74-99, wherein the 3′ end modification comprises one or more of:
[0189] i. a phosphorothioate (PS) linkage between nucleotides;
[0190] ii. a 2′-OMe modified nucleotide;
[0191] iii. a 2′-O-moe modified nucleotide;
[0192] iv. a 2′-F modified nucleotide; and
[0193] v. an inverted abasic modified nucleotide.

[0194] Embodiment 101 is the gRNA of any one of Embodiments 74-100, wherein the 5′ end modification comprises at least one PS linkage, and wherein one or more of:
[0195] i. there is one PS linkage, and the linkage is between the first and second nucleotides;
[0196] ii. there are two PS linkages between the first three nucleotides;
[0197] iii. there are PS linkages between any one or more of the first four nucleotides; and
[0198] iv. there are PS linkages between any one or more of the first five nucleotides.

[0199] Embodiment 102 is the gRNA of Embodiment 101, wherein the 5′ end modification further comprises at least one 2′-OMe, 2′-O-moe, inverted abasic, or 2′-F modified nucleotide.

[0200] Embodiment 103 is the gRNA of any one of Embodiments 1-102, wherein the 5′ end modification comprises:
[0201] i. a modification of one or more of the first 1-4 nucleotides, wherein the modification is a PS linkage, inverted abasic nucleotide, 2′-OMe, 2′-O-moe, or 2′-F;
[0202] ii. a modification to the first nucleotide with 2′-Ome, 2′-O-moe, or 2′-F, and an optional one or two PS linkages to the next nucleotide or the first nucleotide of the 3′ tail;
[0203] iii. a modification to the first or second nucleotide with 2′-Ome, 2′-O-moe, or 2′-F, and optionally one or more PS linkages;
[0204] iv. a modification to the first, second, or third nucleotides with 2′-Ome, 2′-O-moe, or 2′-F, and optionally one or more PS linkages; or
[0205] v. a modification to the first, second, third, or forth nucleotides with 2′-Ome, 2′-O-moe, or 2′-F, and optionally one or more PS linkages.

[0206] Embodiment 104 is the gRNA of any one of Embodiments 1-103, wherein the 3′ end modification comprises at least one PS linkage, and wherein one or more of:
[0207] i. there is one PS linkage, and the linkage is between the last and second to last nucleotides;
[0208] ii. there are two PS linkages between the last three nucleotides; and
[0209] iii. there are PS linkages between any one or more of the last four nucleotides.

[0210] Embodiment 105 is the gRNA of Embodiment 104, wherein the 3′ end modification further comprises at least one 2′-Ome, 2′-O-moe, inverted abasic, or 2′-F modified nucleotide.

[0211] Embodiment 106 is the gRNA of any one of Embodiments 1-105, wherein the 3′ end modification comprises:
[0212] i. a modification of one or more of the last 1-4 nucleotides, wherein the modification is a PS linkage, inverted abasic nucleotide, 2′-OMe, 2′-O-moe, or 2′-F;
[0213] ii. a modification to the last nucleotide with 2′-OMe, 2′-O-moe, or 2′-F, and an optional one or two PS linkages to the next nucleotide or the first nucleotide of the 3′ tail;
[0214] iii. a modification to the last or second to last nucleotide with 2′-OMe, 2′-O-moe, or 2′-F, and optionally one or more PS linkages;
[0215] iv. a modification to the last, second to last, or third to last nucleotides with 2′-OMe, 2′-O-moe, or 2′-F, and optionally one or more PS linkages; or
[0216] v. a modification to the last, second to last, third to last, or fourth to last nucleotides with 2′-OMe, 2′-O-moe, or 2′-F, and optionally one or more PS linkages.

[0217] Embodiment 107 is the gRNA of any one of Embodiments 1-106, wherein the modification in the repeat/anti-repeat region, the hairpin 1 region, or the hairpin 2 region comprises a modified nucleotide selected from 2′-O-methyl (2′-OMe) modified nucleotide, 2′-O-(2-methoxyethyl) (2′-O-moe) modified nucleotide, a 2′-fluoro (2′-F) modified nucleotide, or a phosphorothioate (PS) linkage between nucleotides.

[0218] Embodiment 108 is the gRNA of any one of Embodiments 1-106, wherein the modification in the repeat/anti-repeat region, the hairpin 1 region, or the hairpin 2 region comprises a modified nucleotide selected from 2′-O-methyl (2′-OMe) modified nucleotide, a 2′-fluoro (2′-F) modified nucleotide, or a phosphorothioate (PS) linkage between nucleotides.

[0219] Embodiment 109 is the gRNA of any one of Embodiments 1-106, wherein the modification in the repeat/anti-repeat region, the hairpin 1 region, or the hairpin 2 region comprises a modified nucleotide selected from 2′-O-methyl (2′-OMe) modified nucleotide or a phosphorothioate (PS) linkage between nucleotides.

[0220] Embodiment 110 is the gRNA of any one of Embodiments 1-109, wherein the modification in the repeat/anti-repeat region does not comprise a phosphorothioate modification at nucleotide 76.

[0221] Embodiment 111 is the gRNA of any one of Embodiments 1-110, wherein the modification in the repeat/anti-repeat region does not comprise a modification at nucleotide 76.

[0222] Embodiment 112 is the gRNA of any one of Embodiments 1-111, wherein at least 20%, 30%, 40%, or 50% of the nucleotides are modified nucleotides.

[0223] Embodiment 113 is the gRNA of Embodiment 112, wherein the gRNA comprises modified nucleotides selected from 2′-O-methyl (2′-OMe) modified nucleotide, 2′-O-(2-methoxyethyl) (2′-O-moe) modified nucleotide, a 2′-fluoro (2′-F) modified nucleotide, a phosphorothioate (PS) linkage between nucleotides, or combinations thereof.

[0224] Embodiment 114 is the gRNA of any one of Embodiments 1-113, wherein the modification comprises a modification at 1, 2, 3, or 4 nucleotides of nucleotides 106-109.

[0225] Embodiment 115 is the gRNA of any one of Embodiments 113 or 114, wherein the modification comprises a modification at each of nucleotides 106-109.

[0226] Embodiment 116 is the gRNA of any one of Embodiments 114-115, wherein the modification comprises a 2′-O-methyl modification.

[0227] Embodiment 117 is the gRNA of any one of Embodiments 112-116, wherein the gRNA comprises modified nucleotides selected from 2′-O-methyl (2′-Ome) modified nucleotide, a 2′-fluoro (2′-F) modified nucleotide, a phosphorothioate (PS) linkage between nucleotides, or combinations thereof.

[0228] Embodiment 118 is the gRNA of any one of Embodiments 1-117, wherein nucleotides 1-3 of the guide region are modified and nucleotides in the guide region other than nucleotides 1-3 are not modified.

[0229] Embodiment 119 is the gRNA of any one of Embodiments 1-118, wherein a 3′ tail of nucleotide 144 is present in the gRNA, and comprises 2′-O-Me modified nucleotides at nucleotides 141-144 and two PS linkages between nucleotides 141-142 and 142-143 respectively.

[0230] Embodiment 120 is the gRNA of any one of Embodiments 1-119, wherein one or more positions of 49-52, 87-90, or 122-125 is substituted.

[0231] Embodiment 121 is a single guide RNA (sgRNA) comprising any one of SEQ ID NOs: 1-19 and 21-42.

[0232] Embodiment 122 is the gRNA of any one of Embodiments 1-121, comprising a nucleotide sequence having at least 99, 98, 97, 96, 95, 94, 93, 92, 91, 90, 85, 80, 75, or 70% identity to the nucleotide sequence of any one of SEQ ID Nos: 1-19 and 21-42.

[0233] Embodiment 123 is the gRNA of any one of Embodiments 1-121, comprising a nucleotide sequence having at least 99, 98, 97, 96, 95, 94, 93, 92, 91, 90, 85, 80, 75, or 70% identity to the nucleotide sequence of any one of SEQ ID Nos: 1-19 and 21-42, wherein the modification at each nucleotide of the gRNA that corresponds to a nucleotide of the reference sequence identifier in Table 1 is identical to or equivalent to the modification shown in the reference sequence identifier in Table 2.

[0234] Embodiment 124 is the gRNA of any one of Embodiments 1-122, comprising a nucleotide sequence having at least 99, 98, 97, 96, 95, 94, 93, 92, 91, or 90% identity to the sequence from X to the 3′ end of the nucleotide sequence of any one of SEQ ID Nos: 1-5, 7, 8, 11, 12, 13, 15, 16, 18, 19, 21, 23, 24, 26, 27, 28, 30, 31, 33, 34, 35, 37, 39, 41, 101-291, 301-494, 931-946, 951, and 952, where X is the first nucleotide of the conserved region.

[0235] Embodiment 125 is the gRNA of any one of Embodiments 121-124, further comprising a 3′ tail comprising a 2′-O-Me modified nucleotide.

[0236] Embodiment 126 is the gRNA of any one of Embodiments 1-125, wherein the gRNA directs a nuclease to a target sequence for binding.

[0237] Embodiment 127 is the gRNA of any one of Embodiments 1-126, wherein the gRNA directs a nuclease to a target sequence for inducing a double-strand break within the target sequence.

[0238] Embodiment 128 is the gRNA of any one of Embodiments 1-127, wherein the gRNA directs a nuclease to a target sequence for inducing a single-strand break within the target sequence.

[0239] Embodiment 129 is the gRNA of any one of Embodiments 126-129, wherein the nuclease is a Nine Cas9.

[0240] Embodiment 130 is the gRNA of any one of Embodiments 1-129, wherein the gRNA comprises a conservative substitution, optionally wherein the conservative substitution maintains at least one base pair.

[0241] Embodiment 131 is a composition comprising a gRNA of any one of Embodiments 1-130, associated with a lipid nanoparticle (LNP).

[0242] Embodiment 132. An LNP composition comprising a gRNA of any one of Embodiments 1-130.

[0243] Embodiment 133 is a composition comprising the gRNA of any one of Embodiments 1-130, or the composition of any one of Embodiments 131-132, further comprising a nuclease or an mRNA which encodes the nuclease.

[0244] Embodiment 134 is the composition of Embodiment 133, wherein the nuclease is a Cas protein.

[0245] Embodiment 135 is the composition of Embodiment 134, wherein the Cas protein is a Nme Cas9.

[0246] Embodiment 136 is the composition of Embodiment 135, wherein the Nine Cas9 is an Nme1 Cas9, an Nme2 Cas9, or an Nme3 Cas9.

[0247] Embodiment 137 is the composition of any one of Embodiments 133-136, wherein the nuclease has a double strand cleaving activity.

[0248] Embodiment 138 is the composition of any one of Embodiments 133-137, wherein the nuclease has a nickase activity.

[0249] Embodiment 139 is the composition of any one of Embodiments 133-138, wherein the nuclease has a dCas DNA binding domain.

[0250] Embodiment 140 is the composition of any one of Embodiments 133-139, wherein the nuclease is modified.

[0251] Embodiment 141 is the composition of Embodiment 140, wherein the modified nuclease comprises a heterologous functional domain.

[0252] Embodiment 142 is the composition of Embodiment 141, wherein the heterologous functional domain is a deaminase.

[0253] Embodiment 143 is the composition of Embodiment 142, further comprising a UGI or a mRNA encoding a UGI.

[0254] Embodiment 144 is the composition of any one of Embodiments 142-143, wherein the heterologous functional domain is a cytidine deaminase.

[0255] Embodiment 145 is the composition of any one of Embodiments 140-144, wherein the modified nuclease comprises a nuclear localization signal (NLS).

[0256] Embodiment 146 is the composition of any one of Embodiments 133-145, comprising an mRNA which encodes the nuclease.

[0257] Embodiment 147 is the composition of Embodiment 146, wherein the mRNA comprises the sequence of any one of SEQ ID NOs: 636-638.

[0258] Embodiment 148 is a pharmaceutical formulation comprising the gRNA of any one of Embodiments 1-130 or the composition of any one of Embodiments 131-147 and a pharmaceutically acceptable carrier.

[0259] Embodiment 149 is a method of modifying a target DNA comprising, delivering a Cas protein or a nucleic acid encoding a Cas protein, and any one or more of the following to a cell:
[0260] i. the gRNA of any one of Embodiments 1-130;
[0261] ii. the composition of any one of Embodiments 131-147; and
[0262] iii. the pharmaceutical formulation of Embodiment 148.

[0263] Embodiment 150 is the method of Embodiment 149, wherein the method results in an insertion or deletion in a gene.

[0264] Embodiment 151 is the method of Embodiment 149 or 150, wherein the method results in at least one base edit.

[0265] Embodiment 152 is the method of any one of Embodiments 149-151, further comprising delivering to the cell a template, wherein at least a part of the template incorporates into a target DNA at or near a double strand break site induced by the Cas protein.

[0266] Embodiment 153 is the gRNA of any one of Embodiments 1-130, the composition of Embodiments 131-147, or the pharmaceutical formulation of Embodiment 148 for use in preparing a medicament for treating a disease or disorder.

[0267] Embodiment 154 is use of the gRNA of any one of Embodiments 1-130, the composition of Embodiments 131-147, or the pharmaceutical formulation of Embodiment 148 in the manufacture of a medicament for treating a disease or disorder.

### FIGURE LEGENDS

[0268] FIG. 1 shows mean editing results with standard deviation in HEK-Blue™ cells using truncated gRNAs.

[0269] FIG. 2 shows mean percent editing results for dual guide RNA (dgRNA) targeting VEGFA in HEK-Nme2 cells.

[0270] FIG. 3 shows the mean percent editing results of chemically modified sgRNA in HEK-Nme2 cells targeting the VEGFA gene at site T47.

[0271] FIG. 4 shows the mean percent editing results of modified sgRNA in HEK-293 cells targeting the VEGFA gene at site T47.

[0272] FIG. 5 shows mean percent editing at the TTR locus in PMH with increasing doses of Nme2Cas9 mRNA and chemically modified sgRNA.

[0273] FIG. 6 shows mean percent editing at PCSK9 locus in PMH with modified sgRNAs.

[0274] FIG. 7 shows mean percent editing in PMH of several Nme2Cas9 mRNAs with a modified sgRNA.

[0275] FIG. 8A shows mean percent editing at the TTR locus in PMH using varying ratios of sgRNA and Nme2Cas9 mRNA.

[0276] FIG. 8B shows mean percent editing at the TTR locus in PMH using varying ratios a pgRNA and Nme2Cas9 mRNA.

[0277] FIG. 9 shows mean percent editing at the TTR locus in PMH for pgRNAs with Nme2Cas9 mRNA.

[0278] FIG. 10A shows mean percent editing at the VEGFA TS-25 locus in HEK-Nme2 cells for combinations of modified crRNAs and trRNAs with Nme2Cas9 mRNA.

[0279] FIG. 10B shows mean percent editing at the VEGFA TS-47 locus in HEK-Nme2 cells for combinations of modified crRNAs and trRNAs with Nme2Cas9 mRNA.

[0280] FIG. 11 shows mean percent editing at the VEGFA TS-47 locus in HEK-Nme2 cells dgRNAs consisting of different crRNA and tracrRNA combinations for combinations of modified crRNAs and trRNAs with Nme2Cas9 mRNA.

[0281] FIG. 12A shows mean percent editing at TTR exon 1 in PMH for pgRNAs with 2′-OMe modification in the guide sequence.

[0282] FIG. 12B shows mean percent editing at TTR exon 3 in PMH for pgRNAs with 2′-OMe modification in the guide sequence.

[0283] FIG. 12C shows mean percent editing at TTR exon 1 in PMH for pgRNAs with light 2′-OMe modification in the guide sequence.

[0284] FIG. 12D shows mean percent editing at TTR exon 3 in PMH for pgRNAs with light 2′-OMe modification in the guide sequence.

[0285] FIG. 13 shows mean editing percentage in at the PCSK9 locus in PMH.

[0286] FIG. 14A shows mean editing results at the VEGFA locus in HEK cells treated with mRNA C (SEQ ID NO: 622).

[0287] FIG. 14B shows mean editing results at the VEGFA locus in HEK cells treated with mRNA I (SEQ ID NO: 627).

[0288] FIG. 14C shows mean editing results at the VEGFA locus in HEK cells treated with mRNA J (SEQ ID NO: 628).

[0289] FIG. 14D shows mean editing results at the VEGFA locus in PHH cells treated with mRNA C (SEQ ID NO: 622).

[0290] FIG. 14E shows mean editing results at the VEGFA locus in PHH cells treated with mRNA I (SEQ ID NO: 627).

[0291] FIG. 14F shows mean editing results at the VEGFA locus in PHH cells treated with mRNA J (SEQ ID NO: 628).

[0292] FIG. 15 shows mean percent editing at the mouse TTR locus in PMH cells treated with NmeCas9 constructs designed with 1 or 2 nuclear localization sequences.

[0293] FIG. 16 shows mean percent editing at the mouse TTR locus in PMH cells treated with pgRNA and various Nme2Cas9 mRNAs.

[0294] FIG. 17 shows fold change in Nme2Cas9 protein expression compared to SpyCas9 protein expression in PMH, PRH, PCH and PHH cells.

[0295] FIGS. 18A-18F show fold change in Nme2Cas9 protein expression compared to SpyCas9 protein expression in T cells from 2 donors assayed at 24 hours, 48 hours and 72 hours after treatment.

[0296] FIG. 19 shows mean percent editing at the TTR locus in mouse liver treated with sgRNA and Nme2Cas9.

[0297] FIG. 20A shows mean percent editing at the TTR locus in mouse liver following treatment with pgRNA and Nme2Cas9.

[0298] FIG. 20B shows mean serum TTR protein following treatment with pgRNA and Nme2Cas9.

[0299] FIG. 20C shows mean percent TTR knockdown following treatment with pgRNA and Nme2Cas9.

[0300] FIG. 20D shows mean percent editing at the TTR locus in mouse liver following treatment with pgRNA and various Nme2Cas9.

[0301] FIG. 20E shows serum TTR protein knockdown following treatment with pgRNA and various Nme2Cas9.

[0302] FIG. 21 shows mean percent editing in mouse liver following treatment with various Nme2Cas9 constructs.

[0303] FIG. 22 shows mean percent editing in mouse liver following treatment with pgRNA and various Nme2Cas9

[0304] FIG. 23 shows mean percent editing in mouse liver following treatment with various base editors.

[0305] FIG. 24 shows an exemplary schematic of Nme2 sgRNA in a possible secondary structure, including the repeat/anti-repeat region and the hairpin region which includes hairpin 1 and hairpin 2 regions and further indicates the guide region (or targeting region) (denoted with a gray fill with dashed outline), bases not amenable to single or pairwise deletion (denoted with a gray fill with solid outline), bases amenable to single or pairwise deletion (open circles).

[0306] FIG. 25 shows an exemplary sgRNA (G021536; SEQ ID NO: 490) in a possible secondary structure. The methylation is shown in bold; phosphorothioate linkages are indicated by ‘*’. Watson-Crick base pairing is indicated by a ‘-’ between nucleotides in duplex portions. Non-Watson-Crick base pairing is indicated by a ‘•’ between nucleotides in duplex portions.

[0307] FIG. 26 shows the percent editing at the TTR locus in primary mouse hepatocytes.

[0308] FIG. 27 shows serum TTR levels in mice.

[0309] FIG. 28 shows percent editing at the TTR locus in mouse liver samples.

[0310] FIG. 29 shows serum TTR measurements following treatment in mice.

[0311] FIG. 30 shows percent editing at the TTR locus in mouse liver samples.

[0312] FIG. 31 shows the mean percent CD3 negative T cells following TRAC editing with Nme1Cas9.

[0313] FIG. 32 shows the mean percent CD3 negative T cells following TRAC editing with Nme3Cas9.

[0314] FIG. 33 shows the expression of Nme-HiBiT constructs in T cells at 24 hours.

[0315] FIG. 34 shows the CD3-negative cell population as a function of NmeCas9 mRNA amount.

[0316] FIG. 35 shows the dose response curve for select gRNAs in PCH.

[0317] FIG. 36 shows the dose response curve for LNP dilution series in PCH.

[0318] FIG. 37 shows an exemplary sgRNA (Guide ID G032572; SEQ ID NO: 951) in a possible secondary structure. The unmodified nucleotides are shown in bold and methylation is shown in light fonts; phosphorothioate linkages are indicated by ‘*’. Watson-Crick base pairing is indicated by a ‘-’ between nucleotides in duplex portions. Non-Watson-Crick base pairing is indicated by a ‘•’ between nucleotides in duplex portions.

[0319] FIG. 38 shows an exemplary sgRNA (Guide ID G031771; SEQ ID NO: 952) in a possible secondary structure. The unmodified nucleotides are shown in bold and methylation is shown in light fonts; phosphorothioate linkages are indicated by ‘*’. Watson-Crick base pairing is indicated by a ‘-’ between nucleotides in duplex portions. Non-Watson-Crick base pairing is indicated by a ‘•’ between nucleotides in duplex portions.

[0320] FIG. 39 shows serum TTR levels in mice.

[0321] FIG. 40 shows percent editing at the TTR locus in mouse liver samples.

[0322] FIG. 41 shows the dose response curve for select gRNAs in PMH.

[0323] FIG. 42 shows the dose response curve for select gRNAs in PMH.

### DETAILED DESCRIPTION

[0324] Provided herein are shortened gRNAs for use in gene editing methods. Examples of sequences of engineered and tested gRNAs are shown in Tables 1-2.

[0325] Certain of the gRNAs provided herein are single guide RNAs (sgRNAs) for use in gene editing methods.

[0326] Certain of the gRNAs provided herein are dual guide RNAs (dgRNAs) for use in gene editing methods.

[0327] This disclosure further provides exemplary uses of these gRNAs to alter the genome of a target nucleic acid in vitro (e.g., cells cultured in vitro for use in ex vivo therapy or other uses of genetically edited cells) or in a cell in a subject such as a human (e.g., for use in in vivo therapy).

TABLE 1
Exemplary Sequences for gRNAs

| | SEQ | |
|---|---|---|
| Length | ID | |
| (nt) | NO: | Sequence |
| 145 | 500 | NNNNNNNNNNNNNNNNNNNNNNNNGUUGUA |
| | | GCUCCCUUUCUCAUUUCGGAAACGAAAUGA |
| | | GAACCGUUGCUACAAUAAGGCCGUCUGAAA |
| | | AGAUGUGCCGCAACGCUCUGCCCCUUAAAG |
| | | CUUCUGCUUUAAGGGGCAUCGUUUA |
| 101 | 1 | (N)₂₀₋₂₅GUUGUAGCUCCCUGAAACCGUU |
| | | GCUACAAUAAGGCCGUCGAAAGAUGUGCCG |
| | | CAACGCUCUGCCUUCUGGCAUCGUU |
| 105 | 2 | (N)₂₀₋₂₅GUUGUAGCUCCCUGAAACCGUU |
| | | GCUACAAUAAGGCCGUCGAAAGAUGUGCCG |
| | | CAACGCUCUGCCUUCUGGCAUCGUUUAUU |
| 107 | 3 | (N)₂₀₋₂₅GUUGUAGCUCCCUGGAAACCCG |
| | | UUGCUACAAUAAGGCCGUCGAAAGAUGUGC |
| | | CGCAACGCUCUGCCUUCUGGCAUCGUUUAU |
| | | U |
| 101 | 4 | mN*mNNNNNNNNmNNNmNNNNNNNNNNNNm |
| | | GUUGmUmAmGmCUCCCmUmGmAmAmAmCmC |
| | | GUUmGmCUAmCAAU*AAGmGmCCmGmUmCm |
| | | GmAmAmAmGmAmUGUGCmCGCmAmAmCmGC |
| | | UCUmGmCCmUmUmCmUGmGCmAmUC*mG*m |
| | | U*mU |
| 97-102 | 5 | (N)₂₀₋₂₅mGUUGmUmAmGmCUCCCmUmGm |
| | | AmAmAmCmCGUUmGmCUAmCAAU*AAGmGm |
| | | CCmGmUmCmGmAmAmAmGmAmUGUGCmCGC |
| | | mAmAmCmGCUCUmGmCCmUmUmCmUGmGCm |
| | | AmUC*mG*mU*mU |
| 77 | 6 | mGUUGmUmAmGmCUCCCmUmGmAmAmAmCm |
| | | CGUUmGmCUAmCAAU*AAGmGmCCmGmUmC |
| | | mGmAmAmAmGmAmUGUGCmCGCmAmAmCmG |
| | | CUCUmGmCCmUmUmCmUGmGCmAmUC*mG* |
| | | mU*mU |
| 101 | 7 | mN*mN*mN*mNmNNNmNmNNmNNmNNNNNm |
| | | NNNNmNNNmGUUGmUmAmGmCUCCCmUmGm |
| | | AmAmAmCmCGUUmGmCUAmCAAU*AAGmGm |
| | | CCmGmUmCmGmAmAmAmGmAmUGUGCmCGm |
| | | CAAmCGCUCUmGmCCmUmUmCmUGGCAUCG |
| | | *mU*mU |
| 97-102 | 8 | (N)₂₀₋₂₅mGUUGmUmAmGmCUCCCmUmGm |
| | | AmAmAmCmCGUUmGmCUAmCAAU*AAGmGm |
| | | CCmGmUmCmGmAmAmAmGmAmUGUGCmCGm |
| | | CAAmCGCUCUmGmCCmUmUmCmUGGCAUCG |
| | | *mU*mU |
| 77 | 9 | mGUUGmUmAmGmCUCCCmUmGmAmAmAmCm |
| | | CGUUmGmCUAmCAAU*AAGmGmCCmGmUmC |
| | | mGmAmAmAmGmAmUGUGCmCGmCAAmCGCU |
| | | CUmGmCCmUmUmCmUGGCAUCG*mU*mU |
| 105 | 10 | (N)₂₀₋₂₅GUUGUAGCUCCCUUCGAAAGAC |
| | | CGUUGCUACAAUAAGGCCGUCGAAAGAUGU |
| | | GCCGCAACGCUCUGCCUUCUGGCAUCGUU |
| 105 | 11 | mN*mN*mN*mNmNNNmNmNNmNNmNNNNNm |
| | | NNNNmNNNmGUUGmUmAmGmCUCCCmUmUm |
| | | CmGmAmAmAmGmAmCmCGUUmGmCUAmCAA |
| | | U*AAGmGmCCmGmUmCmGmAmAmAmGmAmU |
| | | GUGCmCGmCAAmCGCUCUmGmCCmUmUmCm |
| | | UGGCAUCG*mU*mU |
| 101 | 12 | mN*mNNNNNNNNmNNNmNNNNNNNNNNNNm |
| | | GUUGmUmAmGmCUCCCmUmGmAmAmAmCmC |
| | | GUUmGmCUAmCAAUAAGmGmCCmGmUmCmG |
| | | mAmAmAmGmAmUGUGCmCGCmAmAmCmGCU |
| | | CUmGmCCmUmUmCmUGmGCmAmUC*mG*mU |
| | | *mU |
| 97-102 | 13 | (N)₂₀₋₂₅mGUUGmUmAmGmCUCCCmUmGm |
| | | AmAmAmCmCGUUmGmCUAmCAAUAAGmGmC |
| | | CmGmUmCmGmAmAmAmGmAmUGUGCmCGCm |
| | | AmAmCmGCUCUmGmCCmUmUmCmUGmGCmA |
| | | mUC*mG*mU*mU |
| 77 | 14 | mGUUGmUmAmGmCUCCCmUmGmAmAmAmCm |
| | | CGUUmGmCUAmCAAUAAGmGmCCmGmUmCm |
| | | GmAmAmAmGmAmUGUGCmCGCmAmAmCmGC |
| | | UCUmGmCCmUmUmCmUGmGCmAmUC*mG*m |
| | | U*mU |
| 101 | 15 | mN*mN*mN*mNmNNNmNmNNmNNmNNNNNm |
| | | NNNNmNNNmGUUGmUmAmGmCUCCCmUmGm |
| | | AmAmAmCmCGUUmGmCUAmCAAUAAGmGmC |
| | | CmGmUmCmGmAmAmAmGmAmUGUGCmCGmC |
| | | AAmCGCUCUmGmCCmUmUmCmUGGCAUCG* |
| | | mU*mU |
| 97-102 | 16 | (N)₂₀₋₂₅mGUUGmUmAmGmCUCCCmUmGm |
| | | AmAmAmCmCGUUmGmCUAmCAAUAAGmGmC |
| | | CmGmUmCmGmAmAmAmGmAmUGUGCmCGmC |
| | | AAmCGCUCUmGmCCmUmUmCmUGGCAUCG* |
| | | mU*mU |
| 77 | 17 | mGUUGmUmAmGmCUCCCmUmGmAmAmAmCm |
| | | CGUUmGmCUAmCAAUAAGmGmCCmGmUmCm |
| | | GmAmAmAmGmAmUGUGCmCGmCAAmCGCUC |
| | | UmGmCCmUmUmCmUGGCAUCG*mU*mU |
| 105 | 18 | mN*mN*mN*mNmNNNmNmNNmNNmNNNNNm |
| | | NNNNmNNNmGUUGmUmAmGmCUCCCmUmUm |
| | | CmGmAmAmAmGmAmCmCGUUmGmCUAmCAA |
| | | UAAGmGmCCmGmUmCmGmAmAmAmGmAmUG |
| | | UGCmCGmCAAmCGCUCUmGmCCmUmUmCmU |
| | | GGCAUCG*mU*mU |
| 101 | 19 | mN*mNNNNNNNNmNNNmNNNNNNNNNNNNm |
| | | GUUGmUmAmGmCUCCCmUmGmAmAmAmCmC |
| | | GUUmGmCUAmCAAU*AAGmGmCCmGmUmCm |
| | | GmAmAmAmGmAmUGUGCmCGCmAmAmCmGm |
| | | CmUmCmUmGmCCmUmUmCmUGmGCmAmUC* |
| | | mG*mU*mU |
| 97-102 | 21 | (N)₂₀₋₂₅mGUUGmUmAmGmCUCCCmUmGm |
| | | AmAmAmCmCGUUmGmCUAmCAAU*AAGmGm |
| | | CCmGmUmCmGmAmAmAmGmAmUGUGCmCGC |
| | | mAmAmCmGmCmUmCmUmGmCCmUmUmCmUG |
| | | mGCmAmUC*mG*mU*mU |
| 77 | 22 | mGUUGmUmAmGmCUCCCmUmGmAmAmAmCm |
| | | CGUUmGmCUAmCAAU*AAGmGmCCmGmUmC |
| | | mGmAmAmAmGmAmUGUGCmCGCmAmAmCmG |
| | | mCmUmCmUmGmCCmUmUmCmUGmGCmAmUC |
| | | *mG*mU*mU |
| 101 | 23 | mN*mN*mN*mNmNNNmNmNNmNNmNNNNNm |
| | | NNNNmNNNmGUUGmUmAmGmCUCCCmUmGm |
| | | AmAmAmCmCGUUmGmCUAmCAAU*AAGmGm |
| | | CCmGmUmCmGmAmAmAmGmAmUGUGCmCGm |
| | | CAAmCGmCmUmCmUmGmCCmUmUmCmUGGC |
| | | AUCG*mU*mU |
| 97-102 | 24 | (N)₂₀₋₂₅mGUUGmUmAmGmCUCCCmUmGm |
| | | AmAmAmCmCGUUmGmCUAmCAAU*AAGmGm |
| | | CCmGmUmCmGmAmAmAmGmAmUGUGCmCGm |
| | | CAAmCGmCmUmCmUmGmCCmUmUmCmUGGC |
| | | AUCG*mU*mU |
| 77 | 25 | mGUUGmUmAmGmCUCCCmUmGmAmAmAmCm |
| | | CGUUmGmCUAmCAAU*AAGmGmCCmGmUmC |
| | | mGmAmAmAmGmAmUGUGCmCGmCAAmCGmC |
| | | mUmCmUmGmCCmUmUmCmUGGCAUCG*mU* |
| | | mU |
| 105 | 26 | mN*mN*mN*mNmNNNmNmNNmNNmNNNNNm |
| | | NNNNmNNNmGUUGmUmAmGmCUCCCmUmUm |
| | | CmGmAmAmAmGmAmCmCGUUmGmCUAmCAA |
| | | U*AAGmGmCCmGmUmCmGmAmAmAmGmAmU |
| | | GUGCmCGmCAAmCGmCmUmCmUmGmCCmUm |
| | | UmCmUGGCAUCG*mU*mU |
| 101 | 27 | mN*mNNNNNNNNmNNNmNNNNNNNNNNNNm |
| | | GUUGmUmAmGmCUCCCmUmGmAmAmAmCmC |
| | | GUUmGmCUAmCAAUAAGmGmCCmGmUmCmG |
| | | mAmAmAmGmAmUGUGCmCGCmAmAmCmGmC |
| | | mUmCmUmGmCCmUmUmCmUGmGCmAmUC*m |
| | | G*mU*mU |
| 97-102 | 28 | (N)₂₀₋₂₅mGUUGmUmAmGmCUCCCmUmGm |
| | | AmAmAmCmCGUUmGmCUAmCAAUAAGmGmC |
| | | CmGmUmCmGmAmAmAmGmAmUGUGCmCGCm |
| | | AmAmCmGmCmUmCmUmGmCCmUmUmCmUGm |
| | | GCmAmUC*mG*mU*mU |
| 77 | 29 | mGUUGmUmAmGmCUCCCmUmGmAmAmAmCm |
| | | CGUUmGmCUAmCAAUAAGmGmCCmGmUmCm |
| | | GmAmAmAmGmAmUGUGCmCGCmAmAmCmGm |
| | | CmUmCmUmGmCCmUmUmCmUGmGCmAmUC* |
| | | mG*mU*mU |
| 101 | 30 | mN*mN*mN*mNmNNNmNmNNmNNmNNNNNm |
| | | NNNNmNNNmGUUGmUmAmGmCUCCCmUmGm |
| | | AmAmAmCmCGUUmGmCUAmCAAUAAGmGmC |
| | | CmGmUmCmGmAmAmAmGmAmUGUGCmCGmC |
| | | AAmCGmCmUmCmUmGmCCmUmUmCmUGGCA |
| | | UCG*mU*mU |
| 97-102 | 31 | (N)₂₀₋₂₅mGUUGmUmAmGmCUCCCmUmGm |
| | | AmAmAmCmCGUUmGmCUAmCAAUAAGmGmC |
| | | CmGmUmCmGmAmAmAmGmAmUGUGCmCGmC |
| | | AAmCGmCmUmCmUmGmCCmUmUmCmUGGCA |
| | | UCG*mU*mU |
| 77 | 32 | mGUUGmUmAmGmCUCCCmUmGmAmAmAmCm |
| | | CGUUmGmCUAmCAAUAAGmGmCCmGmUmCm |
| | | GmAmAmAmGmAmUGUGCmCGmCAAmCGmCm |
| | | UmCmUmGmCCmUmUmCmUGGCAUCG*mU*m |
| | | U |
| 97-102 | 33 | (N)₂₀₋₂₅mGUUGmUmAmGmCUCCCmUmGm |
| | | AmAmAmCmCGUUmGmCUAmCAAUAAGmGmC |
| | | CmGmUmCmGmAmAmAmGmAmUGUGCmCGCm |
| | | AmAmCmGmCmUmCmUmGmCCmUmUmCmUGm |
| | | GCmAmUC*mG*mU*mU |
| 105 | 34 | mN*mN*mN*mNmNNNmNmNNmNNmNNNNNm |
| | | NNNNmNNNmGUUGmUmAmGmCUCCCmUmUm |
| | | CmGmAmAmAmGmAmCmCGUUmGmCUAmCAA |
| | | UAAGmGmCCmGmUmCmGmAmAmAmGmAmUG |
| | | UGCmCGmCAAmCGmCmUmCmUmGmCCmUmU |
| | | mCmUGGCAUCG*mU*mU |
| 101-106 | 35 | (N)₂₀₋₂₅mGUUGmUmAmGmCUCCCmUmUm |
| | | CmGmAmAmAmGmAmCmCGUUmGmCUAmCAA |
| | | UAAGmGmCCmGmUmCmGmAmAmAmGmAmUG |
| | | UGCmCGmCAAmCGmCmUmCmUmGmCCmUmU |
| | | mCmUGGCAUCG*mU*mU |
| 81 | 36 | mGUUGmUmAmGmCUCCCmUmUmCmGmAmAm |
| | | AmGmAmCmCGUUmGmCUAmCAAUAAGmGmC |
| | | CmGmUmCmGmAmAmAmGmAmUGUGCmCGmC |
| | | AAmCGmCmUmCmUmGmCCmUmUmCmUGGCA |
| | | UCG*mU*mU |
| 101-106 | 37 | (N)₂₀₋₂₅mGUUGmUmAmGmCUCCCmUmUm |
| | | CmGmAmAmAmGmAmCmCGUUmGmCUAmCAA |
| | | U*AAGmGmCCmGmUmCmGmAmAmAmGmAmU |
| | | GUGCmCGmCAAmCGCUCUmGmCCmUmUmCm |
| | | UGGCAUCG*mU*mU |
| 81 | 38 | mGUUGmUmAmGmCUCCCmUmUmCmGmAmAm |
| | | AmGmAmCmCGUUmGmCUAmCAAU*AAGmGm |
| | | CCmGmUmCmGmAmAmAmGmAmUGUGCmCGm |
| | | CAAmCGCUCUmGmCCmUmUmCmUGGCAUCG |
| | | *mU*mU |
| 101-106 | 39 | (N)₂₀₋₂₅mGUUGmUmAmGmCUCCCmUmUm |
| | | CmGmAmAmAmGmAmCmCGUUmGmCUAmCAA |
| | | UAAGmGmCCmGmUmCmGmAmAmAmGmAmUG |
| | | UGCmCGmCAAmCGCUCUmGmCCmUmUmCmU |
| | | GGCAUCG*mU*mU |
| 81 | 40 | mGUUGmUmAmGmCUCCCmUmUmCmGmAmAm |
| | | AmGmAmCmCGUUmGmCUAmCAAUAAGmGmC |
| | | CmGmUmCmGmAmAmAmGmAmUGUGCmCGmC |
| | | AAmCGCUCUmGmCCmUmUmCmUGGCAUCG* |
| | | mU*mU |
| 101-106 | 41 | (N)₂₀₋₂₅mGUUGmUmAmGmCUCCCmUmUm |
| | | CmGmAmAmAmGmAmCmCGUUmGmCUAmCAA |
| | | U*AAGmGmCCmGmUmCmGmAmAmAmGmAmU |
| | | GUGCmCGmCAAmCGmCmUmCmUmGmCCmUm |
| | | UmCmUGGCAUCG*mU*mU |
| 81 | 42 | mGUUGmUmAmGmCUCCCmUmUmCmGmAmAm |
| | | AmGmAmCmCGUUmGmCUAmCAAU*AAGmGm |
| | | CCmGmUmCmGmAmAmAmGmAmUGUGCmCGm |
| | | CAAmCGmCmUmCmUmGmCCmUmUmCmUGGC |
| | | AUCG*mU*mU |

TABLE 2
Exemplary sgRNAs

| | SEQ | | SEQ | |
|---|---|---|---|---|
| Guide | ID | sgRNA unmodified | ID | |
| ID | NO. | sequence | NO. | sgRNA modified sequence |
| G017564 | 101 | GUGUGUCCCUCUCCCCACCCGU | 301 | mG*mUGUGUCCCmUCUmCCCCACCCGUCCmGUUGmUmAmGmCUCCCmU |
| | | CCGUUGUAGCUCCCUGGAAACC | | mGmGmAmAmAmCmCmCGUUmGmCUAmCAAUAAGmGmCCmGmUmCmG |
| | | CGUUGCUACAAUAAGGCCGUCG | | mAmAmAmGmAmUGUGCmCGCAACGCUCUmGmCCmUmUmCmUGGCAUC |
| | | AAAGAUGUGCCGCAACGCUCUG | | GUUUAmU*mU |
| | | CCUUCUGGCAUCGUUUAUU | | |
| G017565 | 102 | GGCCUGGCUGAUGAGGCCGCAC | 302 | mG*mG*mC*CUGGCUGAUGAGGCCGCACAUGUUGUAGCUCCCU*mG*mA |
| | | AUGUUGUAGCUCCCUGAAACCG | | *mA*mA*CCGUUGCUACAAUAAGGCCGUmC*mU*mG*mA*mA*mA*mA* |
| | | UUGCUACAAUAAGGCCGUCUGA | | mGAUGUGCCGCAACGCUCUGCCmU*mU*mC*mUGGCAUCGUUU*mA*m |
| | | AAAGAUGUGCCGCAACGCUCUG | | U*mC |
| | | CCUUCUGGCAUCGUUUAUC | | |
| G017566 | 103 | GGCCUGGCUGAUGAGGCCGCAC | 303 | mG*mG*mC*CUGGCUGAUGAGGCCGCACAUGUUGUAGCUCCCU*mG*mA |
| | | AUGUUGUAGCUCCCUGAAACCG | | *mA*mA*CCGUUGCUACAAUAAGGCCGUmC*mG*mA*mA*mA*mGAUGU |
| | | UUGCUACAAUAAGGCCGUCGAA | | GCCGCAACGCUCUGCCmU*mU*mC*mUGGCAUCGUUU*mA*mU*mC |
| | | AGAUGUGCCGCAACGCUCUGCC | | |
| | | UUCUGGCAUCGUUUAUC | | |
| G020031 | 104 | GUGUGUCCCUCUCCCCACCCGU | 304 | GUGUGUCCCUCUCCCCACCCGUCCGUUGUAGCUCCCUGGAAACCCGUU |
| | | CCGUUGUAGCUCCCUGGAAACC | | GCUACAAUAAGGCCGUCGAAAGAUGUGCCGCAACGCUCUGCCUUCUGG |
| | | CGUUGCUACAAUAAGGCCGUCG | | CAUCGUUUAUU |
| | | AAAGAUGUGCCGCAACGCUCUG | | |
| | | CCUUCUGGCAUCGUUUAUU | | |
| G020032 | 105 | GUGUGUCCCUCUCCCCACCCGU | 305 | mG*mU*mG*UGUCCCUCUCCCCACCCGUCCGUUGUAGCUCCCUGGAAAC |
| | | CCGUUGUAGCUCCCUGGAAACC | | CCGUUGCUACAAUAAGGCCGUCGAAAGAUGUGCCGCAACGCUCUGCCU |
| | | CGUUGCUACAAUAAGGCCGUCG | | UCUGGCAUCGUUU*mA*mU*mU |
| | | AAAGAUGUGCCGCAACGCUCUG | | |
| | | CCUUCUGGCAUCGUUUAUU | | |
| G020033 | 106 | GUGUGUCCCUCUCCCCACCCGU | 306 | mG*mU*mG*UGUCCCUCUCCCCACCCGUCCGUUGUAGCUCCCUGGAAAC |
| | | CCGUUGUAGCUCCCUGGAAACC | | CCGUUGCUACAAUAAGGCCGUCGAAAGAUGUGCCGCAACGCUCUGCCU |
| | | CGUUGCUACAAUAAGGCCGUCG | | UCUGGCAUCGUUUA*mU*mU |
| | | AAAGAUGUGCCGCAACGCUCUG | | |
| | | CCUUCUGGCAUCGUUUAUU | | |
| G020034 | 107 | GUGUGUCCCUCUCCCCACCCGU | 307 | mG*mUGUGUCCCUCUCCCCACCCGUCCGUUGUAGCUCCCUGGAAACCC |
| | | CCGUUGUAGCUCCCUGGAAACC | | GUUGCUACAAUAAGGCCGUCGAAAGAUGUGCCGCAACGCUCUGCCUUC |
| | | CGUUGCUACAAUAAGGCCGUCG | | UGGCAUCGUUUAmU*mU |
| | | AAAGAUGUGCCGCAACGCUCUG | | |
| | | CCUUCUGGCAUCGUUUAUU | | |
| G020035 | 108 | GUGUGUCCCUCUCCCCACCCGU | 308 | mG*mUGUGUCCCUCUCCCCACCCGUCCdGUUGdTdAdGdCUCCCdTdG |
| | | CCGUUGUAGCUCCCUGGAAACC | | dGdAdAdAdCdCdCGdTUdGdCUdAdCAAUAAGdGdCdCdGdUdCdGd |
| | | CGUUGCUACAAUAAGGCCGUCG | | AdAdAdGdAdUGdUGCdCGdCdAdAdCdGCUCUdGdCCdUdUdCdUGd |
| | | AAAGAUGUGCCGCAACGCUCUG | | GCdAdUCGdUdUUAmU*mU |
| | | CCUUCUGGCAUCGUUUAUU | | |
| G020036 | 109 | GUGUGUCCCUCUCCCCACCCGU | 309 | mG*mUGUGUCCCUCUCCCCACCCGUCCGUUGUAGCUCCCUGGAAACCC |
| | | CCGUUGUAGCUCCCUGGAAACC | | GUUGCUACAAUAAGGCCGUCGAAAGAUGUGCCGCAACGCUCUGCCUUC |
| | | CGUUGCUACAAUAAGGCCGUCG | | UGGCAUCGUUUAU*mU |
| | | AAAGAUGUGCCGCAACGCUCUG | | |
| | | CCUUCUGGCAUCGUUUAUU | | |
| G020037 | 110 | GUGUGUCCCUCUCCCCACCCGU | 310 | mG*mUGUGUCCCUCUCCCCACCCGUCCGUUGUAGCUCCCUGGAAACCC |
| | | CCGUUGUAGCUCCCUGGAAACC | | GUUGCUACAAUAAGGCCGUCGAAAGAUGUGCCGCAACGmCmUmCUGCC |
| | | CGUUGCUACAAUAAGGCCGUCG | | UUCUGGCAUCGUUUAmU*mU |
| | | AAAGAUGUGCCGCAACGCUCUG | | |
| | | CCUUCUGGCAUCGUUUAUU | | |
| G020038 | 111 | GUGUGUCCCUCUCCCCACCCGU | 311 | mGmUGUGUCCCUCUCCCCACCCGUCCGUUGUAGCUCCCUGGAAACCCG |
| | | CCGUUGUAGCUCCCUGGAAACC | | UUGCUACAAUAAGGCCGUCGAAAGAUGUGCCGCAACGCUCUGCCUUCU |
| | | CGUUGCUACAAUAAGGCCGUCG | | GGCAUCGUUUAmU*mU |
| | | AAAGAUGUGCCGCAACGCUCUG | | |
| | | CCUUCUGGCAUCGUUUAUU | | |
| G020039 | 112 | GUGUGUCCCUCUCCCCACCCGU | 312 | mG*mUGUGUCCCmUCUmCCCCACCCGUCCmGUUGmUmAmGmCUCCCmU |
| | | CCGUUGUAGCUCCCUGGAAACC | | mGmGmAmAmAmCmCmCGUUmGmCUAmCAAUAAGmGmCCmGmUmCmG |
| | | CGUUGCUACAAUAAGGCCGUCG | | mAmAmAmGmAmUGUGCmCGCAACGCUCUmGmCCmUmUmCmUGGCAUC |
| | | AAAGAUGUGCCGCAACGCUCUG | | GUUUAmU*mU |
| | | CCUUCUGGCAUCGUUUAUU | | |
| G020040 | 113 | GUGUGUCCCUCUCCCCACCCGU | 313 | mG*mUG*UGU*CCCmUCUmCCC*CACCCGUCCmGUUGmUmAmGmCU*C* |
| | | CCGUUGUAGCUCCCUGGAAACC | | C*C*mUmGmGmAmAmAmCmCmCGUUmGmCUAmCA*A*U*A*AG*mGmCC |
| | | CGUUGCUACAAUAAGGCCGUCG | | *mGmUmCmGmAmAmAmGmAmUGUGCmCGCAACG*C*U*C*U*mGmCCm |
| | | AAAGAUGUGCCGCAACGCUCUG | | UmUmCmUG*GCAU*C*G*UUU*AmU*mU |
| | | CCUUCUGGCAUCGUUUAUU | | |
| G020041 | 114 | GUGUGUCCCUCUCCCCACCCGU | 314 | mG*mUGUGUCCCmUCUmCCCCACCCGUCCmGUUGmUmAmGmCUCCCmU |
| | | CCGUUGUAGCUCCCUGGAAACC | | mGmGmAmAmAmCmCmCGUUmGmCUAmCAAU*AAGmGmCCmGmUmCm |
| | | CGUUGCUACAAUAAGGCCGUCG | | GmAmAmAmGmAmUGUGCmCGCAACGCUCUmGmCCmUmUmCmUGGCAU |
| | | AAAGAUGUGCCGCAACGCUCUG | | CGUUU*AmU*mU |
| | | CCUUCUGGCAUCGUUUAUU | | |
| G020042 | 115 | GUGUGUCCCUCUCCCCACCCGU | 315 | mG*mUGUGUCCCmUCUmCCCCACCCGUCCmGUUGmUmAmGmCUCCCmU |
| | | CCGUUGUAGCUCCCUGGAAACC | | mGmGmAmAmAmCmCmCGUUmGmCUAmCAAU*AAGmGmCCmGmUmCm |
| | | CGUUGCUACAAUAAGGCCGUCG | | GmAmAmAmGmAmUGUGCmCGCAACGmCmUmCUmGmCCmUmUmCmUG |
| | | AAAGAUGUGCCGCAACGCUCUG | | GCAUCGUUU*AmU*mU |
| | | CCUUCUGGCAUCGUUUAUU | | |
| G020043 | 116 | GUGUGUCCCUCUCCCCACCCGU | 316 | mG*mUGUGUCCCmUCUmCCCCACCCGUCCmGUUGmUmAmGmCUCCCmU |
| | | CCGUUGUAGCUCCCUGGAAACC | | mGmGmAmAmAmCmCmCGUUmGmCUAmCAAU*AAGmGmCCmGmUmCm |
| | | CGUUGCUACAAUAAGGCCGUCG | | GmAmAmAmGmAmUGUGCmCGCAACGCUCUmGmCCmGmAmAmAGGCA |
| | | AAAGAUGUGCCGCAACGCUCUG | | UCGUUU*AmU*mU |
| | | CCGAAAGGCAUCGUUUAUU | | |
| G020044 | 117 | GUGUGUCCCUCUCCCCACCCGU | 317 | mG*mUGUGUCCCmUCUmCCCCACCCGUCCmGUUGmUmAmGmCUCCCmU |
| | | CCGUUGUAGCUCCCUGGAAACC | | mGmGmAmAmAmCmCmCGUUmGmCUAmCAAU*AAGmGmCCmGmUmCm |
| | | CGUUGCUACAAUAAGGCCGUCG | | GmAmAmAmGmAmUGUGCmCGCAACGCUCUmGmCCmUmUmCmUGGCAU |
| | | AAAGAUGUGCCGCAACGCUCUG | | CGmU*mU |
| | | CCUUCUGGCAUCGUU | | |
| G020045 | 118 | GUGUGUCCCUCUCCCCACCCGU | 318 | GUGUGUCCCUCUCCCCACCCGUCCGUUGUAGCUCCCUGAAACCGUUGC |
| | | CCGUUGUAGCUCCCUGAAACCG | | UACAAUAAGGCCGUCGAAAGAUGUGCCGCAACGCUCUGCCUUCUGGCA |
| | | UUGCUACAAUAAGGCCGUCGAA | | UCGUUUAUU |
| | | AGAUGUGCCGCAACGCUCUGCC | | |
| | | UUCUGGCAUCGUUUAUU | | |
| G020046 | 119 | GUGUGUCCCUCUCCCCACCCGU | 319 | mG*mU*mG*UGUCCCUCUCCCCACCCGUCCGUUGUAGCUCCCUGAAACC |
| | | CCGUUGUAGCUCCCUGAAACCG | | GUUGCUACAAUAAGGCCGUCGAAAGAUGUGCCGCAACGCUCUGCCUUC |
| | | UUGCUACAAUAAGGCCGUCGAA | | UGGCAUCGUUU*mA*mU*mU |
| | | AGAUGUGCCGCAACGCUCUGCC | | |
| | | UUCUGGCAUCGUUUAUU | | |
| G020047 | 120 | GUGUGUCCCUCUCCCCACCCGU | 320 | mG*mU*mG*UGUCCCUCUCCCCACCCGUCCGUUGUAGCUCCCUGAAACC |
| | | CCGUUGUAGCUCCCUGAAACCG | | GUUGCUACAAUAAGGCCGUCGAAAGAUGUGCCGCAACGCUCUGCCUUC |
| | | UUGCUACAAUAAGGCCGUCGAA | | UGGCAUCGUUUA*mU*mU |
| | | AGAUGUGCCGCAACGCUCUGCC | | |
| | | UUCUGGCAUCGUUUAUU | | |
| G020048 | 121 | GUGUGUCCCUCUCCCCACCCGU | 321 | mG*mUGUGUCCCUCUCCCCACCCGUCCGUUGUAGCUCCCUGAAACCGU |
| | | CCGUUGUAGCUCCCUGAAACCG | | UGCUACAAUAAGGCCGUCGAAAGAUGUGCCGCAACGCUCUGCCUUCUG |
| | | UUGCUACAAUAAGGCCGUCGAA | | GCAUCGUUUAmU*mU |
| | | AGAUGUGCCGCAACGCUCUGCC | | |
| | | UUCUGGCAUCGUUUAUU | | |
| G020049 | 122 | GUGUGUCCCUCUCCCCACCCGU | 322 | mG*mUGUGUCCCUCUCCCCACCCGUCCdGUUGdTdAdGdCUCCCdTd |
| | | CCGUUGUAGCUCCCUGAAACCG | | GdAdAdAdCdCGdTUdGdCUdAdCAAUAAGdGdCdCdGdUdCdGdAd |
| | | UUGCUACAAUAAGGCCGUCGAA | | AdAdGdAdUGdUGCdCGdCdAdAdCdGCUCUdGdCCdUdUdCdUGdG |
| | | AGAUGUGCCGCAACGCUCUGCC | | CdAdUCGdUdUUAmU*mU |
| | | UUCUGGCAUCGUUUAUU | | |
| G020050 | 123 | GUGUGUCCCUCUCCCCACCCGU | 323 | mG*mUGUGUCCCUCUCCCCACCCGUCCGUUGUAGCUCCCUGAAACCGU |
| | | CCGUUGUAGCUCCCUGAAACCG | | UGCUACAAUAAGGCCGUCGAAAGAUGUGCCGCAACGCUCUGCCUUCUG |
| | | UUGCUACAAUAAGGCCGUCGAA | | GCAUCGUUUAU*mU |
| | | AGAUGUGCCGCAACGCUCUGCC | | |
| | | UUCUGGCAUCGUUUAUU | | |
| G020051 | 124 | GUGUGUCCCUCUCCCCACCCGU | 324 | mG*mUGUGUCCCUCUCCCCACCCGUCCGUUGUAGCUCCCUGAAACCGU |
| | | CCGUUGUAGCUCCCUGAAACCG | | UGCUACAAUAAGGCCGUCGAAAGAUGUGCCGCAACGmCmUmCUGCCUU |
| | | UUGCUACAAUAAGGCCGUCGAA | | CUGGCAUCGUUUAmU*mU |
| | | AGAUGUGCCGCAACGCUCUGCC | | |
| | | UUCUGGCAUCGUUUAUU | | |
| G020052 | 125 | GUGUGUCCCUCUCCCCACCCGU | 325 | mGmUGUGUCCCUCUCCCCACCCGUCCGUUGUAGCUCCCUGAAACCGUU |
| | | CCGUUGUAGCUCCCUGAAACCG | | GCUACAAUAAGGCCGUCGAAAGAUGUGCCGCAACGCUCUGCCUUCUGG |
| | | UUGCUACAAUAAGGCCGUCGAA | | CAUCGUUUAmUmU |
| | | AGAUGUGCCGCAACGCUCUGCC | | |
| | | UUCUGGCAUCGUUUAUU | | |
| G020053 | 126 | GUGUGUCCCUCUCCCCACCCGU | 326 | mG*mUGUGUCCCUCUCCCCACCCGUCCGUUGUAGCUCCCUGAAACCGU |
| | | CCGUUGUAGCUCCCUGAAACCG | | UGCUACAAUAAGGCCGUCGAAAGAUGUGCCGCAACGCUCUGCCGAAAG |
| | | UUGCUACAAUAAGGCCGUCGAA | | GCAUCGUUUAmU*mU |
| | | AGAUGUGCCGCAACGCUCUGCC | | |
| | | GAAAGGCAUCGUUUAUU | | |
| G020054 | 127 | GUGUGUCCCUCUCCCCACCCGU | 327 | mG*mUGUGUCCCUCUCCCCACCCGUCCGUUGUAGCUCCCUGAAACCGU |
| | | CCGUUGUAGCUCCCUGAAACCG | | UGCUACAAUAAGGCCGUCGAAAGAUGUGCCGCAACGCUCUGCCUUCUG |
| | | UUGCUACAAUAAGGCCGUCGAA | | GCAUCGmU*mU |
| | | AGAUGUGCCGCAACGCUCUGCC | | |
| | | UUCUGGCAUCGUU | | |
| G020055 | 128 | GUGUGUCCCUCUCCCCACCCGU | 328 | mG*mUGUGUCCCmUCUmCCCCACCCGUCCmGUUGmUmAmGmCUCCCmU |
| | | CCGUUGUAGCUCCCUGAAACCG | | mGmAmAmAmCmCGUUmGmCUAmCAAUAAGmGmCCmGmUmCmGmAmA |
| | | UUGCUACAAUAAGGCCGUCGAA | | mAmGmAmUGUGCmCGCAACGCUCUmGmCCmUmUmCmUGGCAUCGUUU |
| | | AGAUGUGCCGCAACGCUCUGCC | | AmU*mU |
| | | UUCUGGCAUCGUUUAUU | | |
| G020056 | 129 | GUGUGUCCCUCUCCCCACCCGU | 329 | mG*mUGUGUCCCmUCUmCCCCACCCGUCCmGUUGmUmAmGmCUCCCmU |
| | | CCGUUGUAGCUCCCUGAAACCG | | mGmAmAmAmCmCGUUmGmCUAmCAAmUAAGmGmCCmGmUmCmGmAm |
| | | UUGCUACAAUAAGGCCGUCGAA | | AmAmGmAmUGUGCmCGCAmACGCUCUmGmCCmUmUmCmUmGmGCAUC |
| | | AGAUGUGCCGCAACGCUCUGCC | | GmUmUUAmU*mU |
| | | UUCUGGCAUCGUUUAUU | | |
| G020057 | 130 | GUGUGUCCCUCUCCCCACCCGU | 330 | mG*mUmGmUmGmUCCCmUmCmUmCCCCmAmCCCGUCCmGUUGmUmAm |
| | | CCGUUGUAGCUCCCUGAAACCG | | GmCUCCCmUmGmAmAmAmCmCGUUmGmCUAmCAAUAAGmGmCCmGm |
| | | UUGCUACAAUAAGGCCGUCGAA | | UmCmGmAmAmAmGmAmUGUGCmCGCAACGCUCUmGmCCmUmUmCmU |
| | | AGAUGUGCCGCAACGCUCUGCC | | GGCAUCGUUUAmU*mU |
| | | UUCUGGCAUCGUUUAUU | | |
| G020058 | 131 | GUGUGUCCCUCUCCCCACCCGU | 331 | mG*mUmGmUmGmUCCCmUmCmUmCCCCmAmCCCGUCCmGUUGmUmAm |
| | | CCGUUGUAGCUCCCUGAAACCG | | GmCUCCCmUmGmAmAmAmCmCGUUmGmCUAmCAAmUAAGmGmCCmG |
| | | UUGCUACAAUAAGGCCGUCGAA | | mUmCmGmAmAmAmGmAmUGUGCmCGCAmACGCUCUmGmCCmUmUmC |
| | | AGAUGUGCCGCAACGCUCUGCC | | mUmGmGCAUCGmUmUUAmU*mU |
| | | UUCUGGCAUCGUUUAUU | | |
| G020059 | 132 | GUGUGUCCCUCUCCCCACCCGU | 332 | mG*mUmGmUmGmUCCCmUmCmUmCCCCmAmCCCGUCCmGUUGmUmAm |
| | | CCGUUGUAGCUCCCUGAAACCG | | GmCUCCCmUmGmAmAmAmCmCGUUmGmCUAmCAAmUAAGmGmCCmG |
| | | UUGCUACAAUAAGGCCGUCGAA | | mUmCmGmAmAmAmGmAmUGUGCmCGCAmACGCUCUmGmCCmGmAmA |
| | | AGAUGUGCCGCAACGCUCUGCC | | mAmGmGCAUCGmUmUUAmU*mU |
| | | GAAAGGCAUCGUUUAUU | | |
| G020060 | 133 | GUGUGUCCCUCUCCCCACCCGU | 333 | mG*mUmGmUmGmUCCCmUmCmUmCCCCmAmCCCGUCCmGUUGmUmAm |
| | | CCGUUGUAGCUCCCUGAAACCG | | GmCUCCCmUmGmAmAmAmCmCGUUmGmCUAmCAAmUAAGmGmCCmG |
| | | UUGCUACAAUAAGGCCGUCGAA | | mUmCmGmAmAmAmGmAmUGUGCmCGCAmACGCUCUmGmCCmUmUmC |
| | | AGAUGUGCCGCAACGCUCUGCC | | mUmGmGCAUCGmU*mU |
| | | UUCUGGCAUCGUU | | |
| G020061 | 134 | GUGUGUCCCUCUCCCCACCCGU | 334 | mG*mUG*UGU*CCCUCUCCC*CACCCGUCCGUUGUAGCU*C*C*C*U |
| | | CCGUUGUAGCUCCCUGAAACCG | | GAAACCGUUGCUACA*A*U*A*AG*GCC*GUCGAAAGAUGUGCCGCA |
| | | UUGCUACAAUAAGGCCGUCGAA | | ACG*C*U*C*U*GCCUUCUG*GCAU*C*G*UUU*AmU*mU |
| | | AGAUGUGCCGCAACGCUCUGCC | | |
| | | UUCUGGCAUCGUUUAUU | | |
| G020062 | 135 | GUGUGUCCCUCUCCCCACCCGU | 335 | mG*mUGUGUCCCUCUCCCCACCCGUCCGUUG*UAGCU*C*C*C*UGA |
| | | CCGUUGUAGCUCCCUGAAACCG | | AACCGUUGCUACA*A*UA*AG*GCC*GUCGAAAGAUG*UGCCGCAAC |
| | | UUGCUACAAUAAGGCCGUCGAA | | G*C*U*C*U*GCC*UUCUGGCAU*C*G*UUU*AmU*mU |
| | | AGAUGUGCCGCAACGCUCUGCC | | |
| | | UUCUGGCAUCGUUUAUU | | |
| G020063 | 136 | GUGUGUCCCUCUCCCCACCCGU | 336 | mG*mU*GUGUCCCUCUCC*CCACCCGUCCGUUGUAGCUCCCUGAAACCG |
| | | CCGUUGUAGCUCCCUGAAACCG | | UUGCUACAAUAAGGCCGUCGAAAGAUGUGCCGCAACGCUCUGCCUUCU |
| | | UUGCUACAAUAAGGCCGUCGAA | | GGCAUCGUUUAmU*mU |
| | | AGAUGUGCCGCAACGCUCUGCC | | |
| | | UUCUGGCAUCGUUUAUU | | |
| G020064 | 137 | GUGUGUCCCUCUCCCCACCCGU | 337 | mG*mU*GUGUCCCUCUCC*CCACCCGUCCGUUG*UAGCU*C*C*C*UGAA |
| | | CCGUUGUAGCUCCCUGAAACCG | | ACCGUUGCUACA*A*UA*AG*GCC*GUCGAAAGAUG*UGCCGCAACG*C* |
| | | UUGCUACAAUAAGGCCGUCGAA | | U*C*U*GCC*UUCUGGCAU*C*G*UUU*AmU*mU |
| | | AGAUGUGCCGCAACGCUCUGCC | | |
| | | UUCUGGCAUCGUUUAUU | | |
| G020065 | 138 | GUGUGUCCCUCUCCCCACCCGU | 338 | mG*mUGUGUCCCUCUCCC*CACCCGUCCGUUGUAGCUCCCUGAAACCGU |
| | | CCGUUGUAGCUCCCUGAAACCG | | UGCUACAAU*AAGGCCGUCGAAAGAUGUGCCGCAACGCUCUGCCUUCU |
| | | UUGCUACAAUAAGGCCGUCGAA | | GGCAUCGUUU*AmU*mU |
| | | AGAUGUGCCGCAACGCUCUGCC | | |
| | | UUCUGGCAUCGUUUAUU | | |
| G020066 | 139 | GUGUGUCCCUCUCCCCACCCGU | 339 | mG*mUGUGUCCCUCUCCC*CACCCGUCCGUUGUAGCUCCCUGAAACCGU |
| | | CCGUUGUAGCUCCCUGAAACCG | | UGCUACAAU*AAGGCCGUCGAAAGAUGUGCCGCAACGCUCUGCCGAAA |
| | | UUGCUACAAUAAGGCCGUCGAA | | GGCAUCGUUU*AmU*mU |
| | | AGAUGUGCCGCAACGCUCUGCC | | |
| | | GAAAGGCAUCGUUUAUU | | |
| G020067 | 140 | GUGUGUCCCUCUCCCCACCCGU | 340 | mG*mUGUGUCCCUCUCCC*CACCCGUCCGUUGUAGCUCCCUGAAACCGU |
| | | CCGUUGUAGCUCCCUGAAACCG | | UGCUACAAU*AAGGCCGUCGAAAGAUGUGCCGCAACGCUCUGCCUUCU |
| | | UUGCUACAAUAAGGCCGUCGAA | | GGCAUCGmU*mU |
| | | AGAUGUGCCGCAACGCUCUGCC | | |
| | | UUCUGGCAUCGUU | | |
| G020068 | 141 | GUGUGUCCCUCUCCCCACCCGU | 341 | mG*mUG*UGU*CCCmUCUmCCC*CACCCGUCCmGUUGmUmAmGmCU*C* |
| | | CCGUUGUAGCUCCCUGAAACCG | | C*C*mUmGmAmAmAmCmCGUUmGmCUAmCA*A*U*A*AG*mGmCC*mGm |
| | | UUGCUACAAUAAGGCCGUCGAA | | UmCmGmAmAmAmGmAmUGUGCmCGCAACG*C*U*C*U*mGmCCmUmUm |
| | | AGAUGUGCCGCAACGCUCUGCC | | CmUG*GCAU*C*G*UUU*AmU*mU |
| | | UUCUGGCAUCGUUUAUU | | |
| G020069 | 142 | GUGUGUCCCUCUCCCCACCCGU | 342 | mG*mUGUGUCCCmUCUmCCCCACCCGUCCmGUUG*mUmAmGmCU*C*C* |
| | | CCGUUGUAGCUCCCUGAAACCG | | C*mUmGmAmAmAmCmCGUUmGmCUAmCA*A*mUA*AG*mGmCC*mGmU |
| | | UUGCUACAAUAAGGCCGUCGAA | | mCmGmAmAmAmGmAmUG*UGCmCGCAmACG*C*U*C*U*mGmCCmUmU |
| | | AGAUGUGCCGCAACGCUCUGCC | | mCmUmGmGCAU*C*G*mUmUU*AmU*mU |
| | | UUCUGGCAUCGUUUAUU | | |
| G020070 | 143 | GUGUGUCCCUCUCCCCACCCGU | 343 | mG*mUmGmUmGmUCCCmUmCmUmCCCCmAmCCCGUCCmGUUG*mUmA |
| | | CCGUUGUAGCUCCCUGAAACCG | | mGmCU*C*C*C*mUmGmAmAmAmCmCGUUmGmCUAmCA*A*mUA*AG*m |
| | | UUGCUACAAUAAGGCCGUCGAA | | GmCC*mGmUmCmGmAmAmAmGmAmUG*UGCmCGCAmACG*C*U*C*U*m |
| | | AGAUGUGCCGCAACGCUCUGCC | | GmCCmUmUmCmUmGmGCAU*C*G*mUmUU*AmU*mU |
| | | UUCUGGCAUCGUUUAUU | | |
| G020071 | 144 | GUGUGUCCCUCUCCCCACCCGU | 344 | mG*mUGUGUCCCmUCUmCCCCACCCGUCCmGUUGmUmAmGmCUCCCmU |
| | | CCGUUGUAGCUCCCUGAAACCG | | mGmAmAmAmCmCGUUmGmCUAmCAAU*AAGmGmCCmGmUmCmGmAm |
| | | UUGCUACAAUAAGGCCGUCGAA | | AmAmGmAmUGUGCmCGCAACGCUCUmGmCCmUmUmCmUGGCAUCGUU |
| | | AGAUGUGCCGCAACGCUCUGCC | | U*AmU*mU |
| | | UUCUGGCAUCGUUUAUU | | |
| G020072 | 145 | GUGUGUCCCUCUCCCCACCCGU | 345 | mG*mUGUGUCCCmUCUmCCCCACCCGUCCmGUUGmUmAmGmCUCCCmU |
| | | CCGUUGUAGCUCCCUGAAACCG | | mGmAmAmAmCmCGUUmGmCUAmCAAU*AAGmGmCCmGmUmCmGmAm |
| | | UUGCUACAAUAAGGCCGUCGAA | | AmAmGmAmUGUGCmCGCAACGCUCUmGmCCmGmAmAmAGGCAUCGUU |
| | | AGAUGUGCCGCAACGCUCUGCC | | U*AmU*mU |
| | | GAAAGGCAUCGUUUAUU | | |
| G020073 | 146 | GUGUGUCCCUCUCCCCACCCGU | 346 | mG*mUGUGUCCCmUCUmCCCCACCCGUCCmGUUGmUmAmGmCUCCCmU |
| | | CCGUUGUAGCUCCCUGAAACCG | | mGmAmAmAmCmCGUUmGmCUAmCAAU*AAGmGmCCmGmUmCmGmAm |
| | | UUGCUACAAUAAGGCCGUCGAA | | AmAmGmAmUGUGCmCGCAACGCUCUmGmCCmUmUmCmUGGCAUCGmU |
| | | AGAUGUGCCGCAACGCUCUGCC | | *mU |
| | | UUCUGGCAUCGUU | | |
| G020361 | 147 | GGCCUGGCUGAUGAGGCCGCAC | 347 | mG*mGC*CUGGCUmGAUmGAGGCCGCACAUmGUUGmUmAmGmCUCCCU |
| | | AUGUUGUAGCUCCCUCGAAAGC | | mCmGmAmAmAmGCCGUUmGmCUAmCAAU*A*AGmGmCCmGmUmCmGm |
| | | CGUUGCUACAAUAAGGCCGUCG | | AmAmAmGmAmUGUGCmCGCAACGCUCUmGmCCmUmUmCmUGGCAUCG |
| | | AAAGAUGUGCCGCAACGCUCUG | | UUU*AmU*mU |
| | | CCUUCUGGCAUCGUUUAUU | | |
| G020711 | 148 | GUGUGUCCCUCUCCCCACCCGU | 348 | GUGUGUCCCUCUCCCCACCCGUCCGUUGUAGCUCCCUGAAACCGUUGC |
| | | CCGUUGUAGCUCCCUGAAACCG | | UACAAUAAGGCCGUCGAAAGAUGUGCCGCAACGCUCUGCCUUCUGGCA |
| | | UUGCUACAAUAAGGCCGUCGAA | | UCGUU |
| | | AGAUGUGCCGCAACGCUCUGCC | | |
| | | UUCUGGCAUCGUU | | |
| G020712 | 149 | GUGUGUCCCUCUCCCCACCCGU | 349 | GUGUGUCCCmUCUmCCCCACCCGUCCmGUUGmUmAmGmCUCCCmUmG |
| | | CCGUUGUAGCUCCCUGAAACCG | | mAmAmAmCmCGUUmGmCUAmCAAU*AAGmGmCCmGmUmCmGmAmAm |
| | | UUGCUACAAUAAGGCCGUCGAA | | AmGmAmUGUGCmCGCAACGCUCUmGmCCmUmUmCmUGGCAUCGUU |
| | | AGAUGUGCCGCAACGCUCUGCC | | |
| | | UUCUGGCAUCGUU | | |
| G020713 | 150 | GUGUGUCCCUCUCCCCACCCGU | 350 | G*UGUGUCCCUCUCCCCACCCGUCCGUUGUAGCUCCCUGAAACCGUUGC |
| | | CCGUUGUAGCUCCCUGAAACCG | | UACAAUAAGGCCGUCGAAAGAUGUGCCGCAACGCUCUGCCUUCUGGCA |
| | | UUGCUACAAUAAGGCCGUCGAA | | UCGU*U |
| | | AGAUGUGCCGCAACGCUCUGCC | | |
| | | UUCUGGCAUCGUU | | |
| G020714 | 151 | GUGUGUCCCUCUCCCCACCCGU | 351 | mGmUGUGUCCCUCUCCCCACCCGUCCGUUGUAGCUCCCUGAAACCGUU |
| | | CCGUUGUAGCUCCCUGAAACCG | | GCUACAAUAAGGCCGUCGAAAGAUGUGCCGCAACGCUCUGCCUUCUGG |
| | | UUGCUACAAUAAGGCCGUCGAA | | CAUCGmUmU |
| | | AGAUGUGCCGCAACGCUCUGCC | | |
| | | UUCUGGCAUCGUU | | |
| G020715 | 152 | GUGUGUCCCUCUCCCCACCCGU | 352 | mGmUGUGUCCCmUCUmCCCCACCCGUCCmGUUGmUmAmGmCUCCCmU |
| | | CCGUUGUAGCUCCCUGAAACCG | | mGmAmAmAmCmCGUUmGmCUAmCAAUAAGmGmCCmGmUmCmGmAmA |
| | | UUGCUACAAUAAGGCCGUCGAA | | mAmGmAmUGUGCmCGCAACGCUCUmGmCCmUmUmCmUGGCAUCGmUm |
| | | AGAUGUGCCGCAACGCUCUGCC | | U |
| | | UUCUGGCAUCGUU | | |
| G020716 | 153 | GUGUGUCCCUCUCCCCACCCGU | 353 | mGmUGUGUCCCmUCUmCCCCACCCGUCCmGUUGmUmAmGmCUCCCmU |
| | | CCGUUGUAGCUCCCUGAAACCG | | mGmAmAmAmCmCGUUmGmCUAmCAAUAAGmGmCCmGmUmCmGmAmA |
| | | UUGCUACAAUAAGGCCGUCGAA | | mAmGmAmUGUGCmCGCAACGCUCUmGmCCmUmUmCmUGGCAUCGmU* |
| | | AGAUGUGCCGCAACGCUCUGCC | | mU |
| | | UUCUGGCAUCGUU | | |
| G020717 | 154 | GUGUGUCCCUCUCCCCACCCGU | 354 | mG*mUGUGUCCCmUCUmCCCCACCCGUCCmGUUGmUmAmGmCUCCCmU |
| | | CCGUUGUAGCUCCCUGAAACCG | | mGmAmAmAmCmCGUUmGmCUAmCAAUAAGmGmCCmGmUmCmGmAmA |
| | | UUGCUACAAUAAGGCCGUCGAA | | mAmGmAmUGUGCmCGCAACGCUCUmGmCCmUmUmCmUGGCAUCGmUm |
| | | AGAUGUGCCGCAACGCUCUGCC | | U |
| | | UUCUGGCAUCGUU | | |
| G020718 | 155 | GUGUGUCCCUCUCCCCACCCGU | 355 | mG*mU*mG*UGUCCCmUCUmCCCCACCCGUCCmGUUGmUmAmGmCUCC |
| | | CCGUUGUAGCUCCCUGAAACCG | | CmUmGmAmAmAmCmCGUUmGmCUAmCAAU*AAGmGmCCmGmUmCmG |
| | | UUGCUACAAUAAGGCCGUCGAA | | mAmAmAmGmAmUGUGCmCGCAACGCUCUmGmCCmUmUmCmUGGCAUC |
| | | AGAUGUGCCGCAACGCUCUGCC | | GmU*mU |
| | | UUCUGGCAUCGUU | | |
| G020719 | 156 | GUGUGUCCCUCUCCCCACCCGU | 356 | mG*mUGUGUCCCmUCUmCCCCACCCGUCCmGUUGmUmAmGmCUCCCmU |
| | | CCGUUGUAGCUCCCUGAAACCG | | mGmAmAmAmCmCGUUmGmCUAmCAAU*AAGmGmCCmGmUmCmGmAm |
| | | UUGCUACAAUAAGGCCGUCGAA | | AmAmGmAmUGUGCmCGCAACGCUCUmGmCCmUmUmCmUGGCAUC*mG |
| | | AGAUGUGCCGCAACGCUCUGCC | | *mU*mU |
| | | UUCUGGCAUCGUU | | |
| G020720 | 157 | GUGUGUCCCUCUCCCCACCCGU | 357 | mG*mU*mG*UGUCCCmUCUmCCCCACCCGUCCmGUUGmUmAmGmCUCC |
| | | CCGUUGUAGCUCCCUGAAACCG | | CmUmGmAmAmAmCmCGUUmGmCUAmCAAU*AAGmGmCCmGmUmCmG |
| | | UUGCUACAAUAAGGCCGUCGAA | | mAmAmAmGmAmUGUGCmCGCAACGCUCUmGmCCmUmUmCmUGGCAUC |
| | | AGAUGUGCCGCAACGCUCUGCC | | *mG*mU*mU |
| | | UUCUGGCAUCGUU | | |
| G020721 | 158 | GUGUGUCCCUCUCCCCACCCGU | 358 | mG*mU*GUGUCCCmUCUmCCCCACCCGUCCmGUUGmUmAmGmCUCCCm |
| | | CCGUUGUAGCUCCCUGAAACCG | | UmGmAmAmAmCmCGUUmGmCUAmCAAU*AAGmGmCCmGmUmCmGmA |
| | | UUGCUACAAUAAGGCCGUCGAA | | mAmAmGmAmUGUGCmCGCAACGCUCUmGmCCmUmUmCmUGGCAUCG* |
| | | AGAUGUGCCGCAACGCUCUGCC | | mU*mU |
| | | UUCUGGCAUCGUU | | |
| G020722 | 159 | GUGUGUCCCUCUCCCCACCCGU | 359 | mG*UGUGUCCCmUCUmCCCCACCCGUCCmGUUGmUmAmGmCUCCCmUm |
| | | CCGUUGUAGCUCCCUGAAACCG | | GmAmAmAmCmCGUUmGmCUAmCAAU*AAGmGmCCmGmUmCmGmAmA |
| | | UUGCUACAAUAAGGCCGUCGAA | | mAmGmAmUGUGCmCGCAACGCUCUmGmCCmUmUmCmUGGCAUCGU*m |
| | | AGAUGUGCCGCAACGCUCUGCC | | U |
| | | UUCUGGCAUCGUU | | |
| G020723 | 160 | GUGUGUCCCUCUCCCCACCCGU | 360 | mG*mUGUGUCCCmUCUmCCCCACCCGUCCmGUUGmUmAmGmCUCCCmU |
| | | CCGUUGUAGCUCCCUGAAACCG | | mGmAmAmAmCmCGUUmGmCUAmCAAU*AAGmGmCCmGmUmCmGmAm |
| | | UUGCUACAAUAAGGCCGUCGAA | | AmAmGmAmUGUGCmCGCAACGCUCUmGmCCmGmAmAmAGGCAUCGmU |
| | | AGAUGUGCCGCAACGCUCUGCC | | *mU |
| | | GAAAGGCAUCGUU | | |
| G020724 | 161 | GUGUGUCCCUCUCCCCACCCGU | 361 | mG*mUGUGUCCCmUCUmCCCCACCCGUCCmGUUGmUmAmGmCUCCCmU |
| | | CCGUUGUAGCUCCCUGAAACCG | | mGmAmAmAmCmCGUUmGmCUAmCAAU*AAGmGmCCmGmUmCmGmAm |
| | | UUGCUACAAUAAGGCCGUCGAA | | AmAmGmAmUGUGCmCGCAACGmCmUmCUmGmCCmUmUmCmUGGCAUC |
| | | AGAUGUGCCGCAACGCUCUGCC | | GmU*mU |
| | | UUCUGGCAUCGUU | | |
| G020725 | 162 | GUGUGUCCCUCUCCCCACCCGU | 362 | mG*mUGUGUCCCmUCUmCCCCACCCGUCCmGUUGmUmAmGmCUCCCmU |
| | | CCGUUGUAGCUCCCUGAAACCG | | mGmAmAmAmCmCGUUmGmCUAmCAAU*AAGmGmCCmGmUmCmGmAm |
| | | UUGCUACAAUAAGGCCGUCGAA | | AmAmGmAmUGUGCmCGCAACGC*U*C*UmGmCCmUmUmCmUGGCAUCG |
| | | AGAUGUGCCGCAACGCUCUGCC | | mU*mU |
| | | UUCUGGCAUCGUU | | |
| G020726 | 163 | GUGUGUCCCUCUCCCCACCCGU | 363 | mG*mUGUGUCCCmUCUmCCCCACCCGUCCmGUUGmUmAmGmCUCCCmU |
| | | CCGUUGUAGCUCCCUGAAACCG | | mGmAmAmAmCmCGUUmGmCUAmCAAUAAGmGmCCmGmUmCmGmAmA |
| | | UUGCUACAAUAAGGCCGUCGAA | | mAmGmAmUGUGCmCGCAACGCUCUmGmCCmUmUmCmUGGCAUCGmU* |
| | | AGAUGUGCCGCAACGCUCUGCC | | mU |
| | | UUCUGGCAUCGUU | | |
| G020727 | 164 | GUGUGUCCCUCUCCCCACCCGU | 364 | mG*mUGUGUCCCUCUCCCCACCCGUCCGUUGUAGCUCCCUGAAACCGU |
| | | CCGUUGUAGCUCCCUGAAACCG | | UGCUACAAU*AAGGCCGUCGAAAGAUGUGCCGCAACGCUCUGCCUUCU |
| | | UUGCUACAAUAAGGCCGUCGAA | | GGCAUCGmU*mU |
| | | AGAUGUGCCGCAACGCUCUGCC | | |
| | | UUCUGGCAUCGUU | | |
| G020728 | 165 | GUGUGUCCCUCUCCCCACCCGU | 365 | mG*mU*GUGUCCCmUCUmCC*CCACCCGUCCmGUUGmUmAmGmCUCCC |
| | | CCGUUGUAGCUCCCUGAAACCG | | mUmGmAmAmAmCmCGUUmGmCUAmCAAU*AAGmGmCCmGmUmCmGm |
| | | UUGCUACAAUAAGGCCGUCGAA | | AmAmAmGmAmUGUGCmCGCAACGCUCUmGmCCmUmUmCmUGGCAUCG |
| | | AGAUGUGCCGCAACGCUCUGCC | | mU*mU |
| | | UUCUGGCAUCGUU | | |
| G020729 | 166 | GUGUGUCCCUCUCCCCACCCGU | 366 | mG*mUGUGUCCCmUCUmCCCCACCCGUCCmGUUG*mUmAmGmCU*C*C* |
| | | CCGUUGUAGCUCCCUGAAACCG | | C*mUmGmAmAmAmCmCGUUmGmCUAmCA*A*UA*AG*mGmCC*mGmUm |
| | | UUGCUACAAUAAGGCCGUCGAA | | CmGmAmAmAmGmAmUG*UGCmCGCAACG*C*U*C*U*mGmCC*mUmUmC |
| | | AGAUGUGCCGCAACGCUCUGCC | | mUGGCAU*C*G*mU*mU |
| | | UUCUGGCAUCGUU | | |
| G020730 | 167 | GUGUGUCCCUCUCCCCACCCGU | 367 | mG*mUGUGUCCCmUCUmCCCCACCCGUCCmGUUG*mUmAmGmCU*C*C* |
| | | CCGUUGUAGCUCCCUGAAACCG | | C*mUmGmAmAmAmCmCGUUmGmCUAmCA*A*U*A*AG*mGmCC*mGmU |
| | | UUGCUACAAUAAGGCCGUCGAA | | mCmGmAmAmAmGmAmUG*UGCmCGCAACG*C*U*C*U*mGmCC*mUmUm |
| | | AGAUGUGCCGCAACGCUCUGCC | | CmUGGCAU*C*G*mU*mU |
| | | UUCUGGCAUCGUU | | |
| G020731 | 168 | GUGUGUCCCUCUCCCCACCCGU | 368 | mG*mU*GUGUCCCmUCUmCC*CCACCCGUCCmGUUG*mUmAmGmCU*C* |
| | | CCGUUGUAGCUCCCUGAAACCG | | C*C*mUmGmAmAmAmCmCGUUmGmCUAmCA*A*UA*AG*mGmCC*mGm |
| | | UUGCUACAAUAAGGCCGUCGAA | | UmCmGmAmAmAmGmAmUG*UGCmCGCAACG*C*U*C*U*mGmCC*mUmU |
| | | AGAUGUGCCGCAACGCUCUGCC | | mCmUGGCAU*C*G*mU*mU |
| | | UUCUGGCAUCGUU | | |
| G020732 | 169 | GUGUGUCCCUCUCCCCACCCGU | 369 | mG*mU*GUGUCCCmUCUmCC*CCACCCGUCCmGUUG*mUmAmGmCU*C* |
| | | CCGUUGUAGCUCCCUGAAACCG | | C*C*mUmGmAmAmAmCmCGUUmGmCUAmCA*A*U*A*AG*mGmCC*mGm |
| | | UUGCUACAAUAAGGCCGUCGAA | | UmCmGmAmAmAmGmAmUG*UGCmCGCAACG*C*U*C*U*mGmCC*mUmU |
| | | AGAUGUGCCGCAACGCUCUGCC | | mCmUGGCAU*C*G*mU*mU |
| | | UUCUGGCAUCGUU | | |
| G020733 | 170 | GUGUGUCCCUCUCCCCACCCGU | 370 | mG*mUG*UGU*CCCmUCUmCCC*CACCCGUCCmGUUGmUmAmGmCUCCC |
| | | CCGUUGUAGCUCCCUGAAACCG | | mUmGmAmAmAmCmCGUUmGmCUAmCAAU*AAGmGmCCmGmUmCmGm |
| | | UUGCUACAAUAAGGCCGUCGAA | | AmAmAmGmAmUGUGCmCGCAACGCUCUmGmCCmUmUmCmUGGCAUCG |
| | | AGAUGUGCCGCAACGCUCUGCC | | mU*mU |
| | | UUCUGGCAUCGUU | | |
| G020734 | 171 | GUGUGUCCCUCUCCCCACCCGU | 371 | mG*mUGUGUCCCmUCUmCCCCACCCGUCCmGUUGmUmAmGmCU*C*C*C |
| | | CCGUUGUAGCUCCCUGAAACCG | | *mUmGmAmAmAmCmCGUUmGmCUAmCA*A*U*A*AG*mGmCC*mGmUm |
| | | UUGCUACAAUAAGGCCGUCGAA | | CmGmAmAmAmGmAmUGUGCmCGCAACG*C*U*C*U*mGmCCmUmUmCm |
| | | AGAUGUGCCGCAACGCUCUGCC | | UG*GCAU*C*G*mU*mU |
| | | UUCUGGCAUCGUU | | |
| G020735 | 172 | GUGUGUCCCUCUCCCCACCCGU | 372 | mG*mUG*UGU*CCCmUCUmCCC*CACCCGUCCmGUUGmUmAmGmCU*C* |
| | | CCGUUGUAGCUCCCUGAAACCG | | C*C*mUmGmAmAmAmCmCGUUmGmCUAmCA*A*U*A*AG*mGmCC*mGm |
| | | UUGCUACAAUAAGGCCGUCGAA | | UmCmGmAmAmAmGmAmUGUGCmCGCAACG*C*U*C*U*mGmCCmUmUm |
| | | AGAUGUGCCGCAACGCUCUGCC | | CmUG*GCAU*C*G*mU*mU |
| | | UUCUGGCAUCGUU | | |
| G020736 | 173 | GUGUGUCCCUCUCCCCACCCGU | 373 | mG*mUGUGUCCCmUCUmCCCCACCCGUCCmGUUGmUmAmGmCUCCCmU |
| | | CCGUUGUAGCUCCCUGAAACCG | | mGmAmAmAmCmCGUUmGmCUAmCAAU*AAGmGmCCmGmUmCmGmAm |
| | | UUGCUACAAUAAGGCCGUCGAA | | AmAmGmAmUGUGCmCGCAACGCUCUmGmCCmUmUmCmUGGCAUCGmU |
| | | AGAUGUGCCGCAACGCUCUGCC | | *mUmU |
| | | UUCUGGCAUCGUUU | | |
| G020737 | 174 | GUGUGUCCCUCUCCCCACCCGU | 374 | mG*mUGUGUCCCmUCUmCCCCACCCGUCCmGUUGmUmAmGmCUCCCmU |
| | | CCGUUGUAGCUCCCUGAAACCG | | mGmAmAmAmCmCGUUmGmCUAmCAAU*AAGmGmCCmGmUmCmGmAm |
| | | UUGCUACAAUAAGGCCGUCGAA | | AmAmGmAmUGUGCmCGCAACGCUCUmGmCCmUmUmCmUGGCAUCGmU |
| | | AGAUGUGCCGCAACGCUCUGCC | | *mUmU*mA |
| | | UUCUGGCAUCGUUUA | | |
| G020738 | 175 | GUGUGUCCCUCUCCCCACCCGU | 375 | mG*mUGUGUCCCmUCUmCCCCACCCGUCCmGUUGmUmAmGmCUCCCmU |
| | | CCGUUGUAGCUCCCUGAAACCG | | mGmAmAmAmCmCGUUmGmCUAmCAAU*AAGmGmCCmGmUmCmGmAm |
| | | UUGCUACAAUAAGGCCGUCGAA | | AmAmGmAmUGUGCmCGCAACGCUCUmGmCCmUmUmCmUGGCAUCGmU |
| | | AGAUGUGCCGCAACGCUCUGCC | | *mUmU*mA*mU |
| | | UUCUGGCAUCGUUUAU | | |
| G020739 | 176 | GUGUGUCCCUCUCCCCACCCGU | 376 | mG*mUGUGUCCCmUCUmCCCCACCCGUCCmGUUGmUmAmGmCUCCCmU |
| | | CCGUUGUAGCUCCCUUGGAAAC | | mUmGmGmAmAmAmCmCmAmCGUUmGmCUAmCAAU*AAGmGmCCmGm |
| | | CACGUUGCUACAAUAAGGCCGU | | UmCmGmAmAmAmGmAmUGUGCmCGCAACGCUCUmGmCCmUmUmCmU |
| | | CGAAAGAUGUGCCGCAACGCUC | | GGCAUCGmU*mU |
| | | UGCCUUCUGGCAUCGUU | | |
| G020740 | 177 | GUGUGUCCCUCUCCCCACCCGU | 377 | mG*mUGUGUCCCmUCUmCCCCACCCGUCCmGUUGmUmAmGmCUCCCmG |
| | | CCGUUGUAGCUCCCGAAACGUU | | mAmAmAmCGUUmGmCUAmCAAU*AAGmGmCCmGmUmCmGmAmAmAm |
| | | GCUACAAUAAGGCCGUCGAAAG | | GmAmUGUGCmCGCAACGCUCUmGmCCmUmUmCmUGGCAUCGmU*mU |
| | | AUGUGCCGCAACGCUCUGCCUU | | |
| | | CUGGCAUCGUU | | |
| G020741 | 178 | GUGUGUCCCUCUCCCCACCCGU | 378 | mG*mUGUGUCCCmUCUmCCCCACCCGUCCmGUUGmUmAmGmCUCCmG |
| | | CCGUUGUAGCUCCGAAACUUGC | | mAmAmAmCUUmGmCUAmCAAU*AAGmGmCCmGmUmCmGmAmAmAmG |
| | | UACAAUAAGGCCGUCGAAAGAU | | mAmUGUGCmCGCAACGCUCUmGmCCmUmUmCmUGGCAUCGmU*mU |
| | | GUGCCGCAACGCUCUGCCUUCU | | |
| | | GGCAUCGUU | | |
| G020742 | 179 | GUGUGUCCCUCUCCCCACCCGU | 379 | mG*mUGUGUCCCmUCUmCC*CCACCCGUCCmGUUG*mUmAmGmCU*C*C |
| | | CCGUUGUAGCUCCCUGAAACCG | | *C*mUmGmAmAmAmCmCGUUmGmCUAmCA*A*U*A*AG*mGmCC*mGmU |
| | | UUGCUACAAUAAGGCCGUCGAA | | mCmGmAmAmAmGmAmUG*UGCmCGCAACG*mCmUmCU*mGmCC*mUm |
| | | AGAUGUGCCGCAACGCUCUGCC | | UmCmUGGCAU*C*G*mU*mU |
| | | UUCUGGCAUCGUU | | |
| G020743 | 180 | GUGUGUCCCUCUCCCCACCCGU | 380 | mG*mU*mG*UGUCCCmUCUmCC*CCACCCGUCCmGUUG*mUmAmGmCU* |
| | | CCGUUGUAGCUCCCUGAAACCG | | C*C*C*mUmGmAmAmAmCmCGUUmGmCUAmCA*A*U*A*AG*mGmCC* |
| | | UUGCUACAAUAAGGCCGUCGAA | | mGmUmCmGmAmAmAmGmAmUG*UGCmCGCAACG*mCmUmCU*mGmCC* |
| | | AGAUGUGCCGCAACGCUCUGCC | | mUmUmCmUGGCAU*C*G*mU*mU |
| | | UUCUGGCAUCGUU | | |
| G020744 | 181 | GUGUGUCCCUCUCCCCACCCGU | 381 | mG*mUGUGUCCCmUCUmCC*CCACCCGUCCmGUUG*mUmAmGmCU*C*C |
| | | CCGUUGUAGCUCCCUGAAACCG | | *C*mUmGmAmAmAmCmCGUUmGmCUAmCA*A*U*A*AG*mGmCC*mGmU |
| | | UUGCUACAAUAAGGCCGUCGAA | | mCmGmAmAmAmGmAmUG*UGCmCGCAACG*mCmUmCU*mGmCC*mGm |
| | | AGAUGUGCCGCAACGCUCUGCC | | AmAmAGGCAU*C*G*mU*mU |
| | | GAAAGGCAUCGUU | | |
| G020745 | 182 | GUGUGUCCCUCUCCCCACCCGU | 382 | mG*mU*mG*UGUCCCmUCUmCC*CCACCCGUCCmGUUG*mUmAmGmCU* |
| | | CCGUUGUAGCUCCCUGAAACCG | | C*C*C*mUmGmAmAmAmCmCGUUmGmCUAmCA*A*U*A*AG*mGmCC* |
| | | UUGCUACAAUAAGGCCGUCGAA | | mGmUmCmGmAmAmAmGmAmUG*UGCmCGCAACG*mCmUmCU*mGmCC* |
| | | AGAUGUGCCGCAACGCUCUGCC | | mGmAmAmAGGCAU*C*G*mU*mU |
| | | GAAAGGCAUCGUU | | |
| G020746 | 183 | GUGUGUCCCUCUCCCCACCCGU | 383 | mG*mUmGmUmGUCmCmCmUmCUmCCCCAmCCCGmUCCmGUUGmUmAm |
| | | CCGUUGUAGCUCCCUGAAACCG | | GmCUCCCmUmGmAmAmAmCmCGUUmGmCUAmCAAU*AAGmGmCCmGm |
| | | UUGCUACAAUAAGGCCGUCGAA | | UmCmGmAmAmAmGmAmUGUGCmCGCAACGCUCUmGmCCmUmUmCmU |
| | | AGAUGUGCCGCAACGCUCUGCC | | GGCAUCGmU*mU |
| | | UUCUGGCAUCGUU | | |
| G020747 | 184 | GUGUGUCCCUCUCCCCACCCGU | 384 | mG*mUGUGUCCCmUCUmCCCCACCCGUCCmGUUGmUmAmGmCUCCCmU |
| | | CCGUUGUAGCUCCCUGAAACCG | | mGmAmAmAmCmCGmUUmGmCUmAmCAAU*AAGmGmCCmGmUmCmGm |
| | | UUGCUACAAUAAGGCCGUCGAA | | AmAmAmGmAmUGUGCmCGCAACGCUCUmGmCCmUmUmCmUGGCAUCG |
| | | AGAUGUGCCGCAACGCUCUGCC | | mU*mU |
| | | UUCUGGCAUCGUU | | |
| G020748 | 185 | GUGUGUCCCUCUCCCCACCCGU | 385 | mG*mUGUGUCCCmUCUmCCCCACCCGUCCmGUUGmUmAmGmCUCCCm |
| | | CCGUUGUAGCUCCCUGAAACCG | | UmGmAmAmAmCmCGUUmGmCUAmCAAU*AAGmGmCmCmGmUmCmGmA |
| | | UUGCUACAAUAAGGCCGUCGAA | | mAmAmGmAmUGmUGCmCGmCAACGCUCUmGmCCmUmUmCmUGGCAUC |
| | | AGAUGUGCCGCAACGCUCUGCC | | GmU*mU |
| | | UUCUGGCAUCGUU | | |
| G020749 | 186 | GUGUGUCCCUCUCCCCACCCGU | 386 | mG*mUGUGUCCCmUCUmCCCCACCCGUCCmGUUGmUmAmGmCUCCCm |
| | | CCGUUGUAGCUCCCUGAAACCG | | UmGmAmAmAmCmCGUUmGmCUAmCAAU*AAGmGmCCmGmUmCmGmAm |
| | | UUGCUACAAUAAGGCCGUCGAA | | AmAmGmAmUGUGCmCGCmAmAmCmGCUCUmGmCCmUmUmCmUGmGC |
| | | AGAUGUGCCGCAACGCUCUGCC | | mAmUCGmU*mU |
| | | UUCUGGCAUCGUU | | |
| G020750 | 187 | GUGUGUCCCUCUCCCCACCCGU | 387 | mG*mUGUGUCCCmUCUmCCCCACCCGUCCmGUUGmUmAmGmCUCCCmU |
| | | CCGUUGUAGCUCCCUGAAACCG | | mGmAmAmAmCmCGmUUmGmCUmAmCAAU*AAGmGmCmCmGmUmCmG |
| | | UUGCUACAAUAAGGCCGUCGAA | | mAmAmAmGmAmUGmUGCmCGmCmAmAmCmGCUCUmGmCCmUmUmCm |
| | | AGAUGUGCCGCAACGCUCUGCC | | UGmGCmAmUCGmU*mU |
| | | UUCUGGCAUCGUU | | |
| G020751 | 188 | GUGUGUCCCUCUCCCCACCCGU | 388 | mG*mUGUGUCCCmUCUmCCCCACCCGUCCmGUUGmUmAmGmCUCCCm |
| | | CCGUUGUAGCUCCCUGAAACCG | | UmGmAmAmAmCmCGUUmGmCUAmCAAU*AAGmGmCCmGmUmCmUmGm |
| | | UUGCUACAAUAAGGCCGUCUGA | | AmAmAmAmGmAmUGUGCmCGCAACGCUCUmGmCCmUmUmCmUGGCAU |
| | | AAAGAUGUGCCGCAACGCUCUG | | CGmU*mU |
| | | CCUUCUGGCAUCGUU | | |
| G020752 | 189 | GUGUGUCCCUCUCCCCACCCGU | 389 | mG*mUGUGUCCCmUCUmCCCCACCCGUCCmGUUGmUmAmGmCUCCCmU |
| | | CCGUUGUAGCUCCCUGAAACCG | | mGmAmAmAmCmCGUUmGmCUAmCAAU*AAGmGmCCmGmUmCmGmAm |
| | | UUGCUACAAUAAGGCCGUCGAA | | AmAmGmAmUGUGCmCGCAACGCUCUmGmCCCmUmUmCmUmGGGCAUC |
| | | AGAUGUGCCGCAACGCUCUGCC | | GmU*mU |
| | | CUUCUGGGCAUCGUU | | |
| G020753 | 190 | GUGUGUCCCUCUCCCCACCCGU | 390 | mG*mUGUGUCCCmUCUmCCCCACCCGUCCmGUUGmUmAmGmCUCCCmU |
| | | CCGUUGUAGCUCCCUGAAACCG | | mGmAmAmAmCmCGUUmGmCUAmCAAU*AAGmGmCCmGmUmCmUmGm |
| | | UUGCUACAAUAAGGCCGUCUGA | | AmAmAmAmGmAmUGUGCmCGCAACGCUCUmGmCCCmUmUmCmUmGG |
| | | AAAGAUGUGCCGCAACGCUCUG | | GCAUCGmU*mU |
| | | CCCUUCUGGGCAUCGUU | | |
| G020754 | 191 | GUGUGUCCCUCUCCCCACCCGU | 391 | mG*mU*mG*UGUCCCmUCUmCCCCACCCGUCCmGUUGmUmAmGmCUCC |
| | | CCGUUGUAGCUCCCUGAAACCG | | CmUmGmAmAmAmCmCGUUmGmCUAmCAAU*AAGmGmCCmGmUmCmU |
| | | UUGCUACAAUAAGGCCGUCUGA | | mGmAmAmAmAmGmAmUGUGCmCGCAACGCUCUmGmCCmUmUmCmUG |
| | | AAAGAUGUGCCGCAACGCUCUG | | GCAUCGmU*mU |
| | | CCUUCUGGCAUCGUU | | |
| G020755 | 192 | GUGUGUCCCUCUCCCCACCCGU | 392 | mG*mU*mG*UGUCCCmUCUmCCCCACCCGUCCmGUUGmUmAmGmCUCC |
| | | CCGUUGUAGCUCCCUGAAACCG | | CmUmGmAmAmAmCmCGUUmGmCUAmCAAU*AAGmGmCCmGmUmCmG |
| | | UUGCUACAAUAAGGCCGUCGAA | | mAmAmAmGmAmUGUGCmCGCAACGCUCUmGmCCCmUmUmCmUmGGGC |
| | | AGAUGUGCCGCAACGCUCUGCC | | AUCGmU*mU |
| | | CUUCUGGGCAUCGUU | | |
| G020756 | 193 | GUGUGUCCCUCUCCCCACCCGU | 393 | mG*mU*mG*UGUCCCmUCUmCCCCACCCGUCCmGUUGmUmAmGmCUCC |
| | | CCGUUGUAGCUCCCUGAAACCG | | CmUmGmAmAmAmCmCGUUmGmCUAmCAAU*AAGmGmCCmGmUmCmU |
| | | UUGCUACAAUAAGGCCGUCUGA | | mGmAmAmAmAmGmAmUGUGCmCGCAACGCUCUmGmCCCmUmUmCmU |
| | | AAAGAUGUGCCGCAACGCUCUG | | mGGGCAUCGmU*mU |
| | | CCCUUCUGGGCAUCGUU | | |
| G020848 | 194 | UGAGGACCGCCCUGGGCCUGGG | 394 | mU*mGA*GGACCGmCCCmUGGGCCUGGGAGmGUUGmUmAmGmCUCCCU |
| | | AGGUUGUAGCUCCCUCGAAAGC | | mCmGmAmAmAmGCCGUUmGmCUAmCAAU*A*AGmGmCCmGmUmCmGm |
| | | CGUUGCUACAAUAAGGCCGUCG | | AmAmAmGmAmUGUGCmCGCAACGCUCUmGmCCmUmUmCmUGGCAUCG |
| | | AAAGAUGUGCCGCAACGCUCUG | | UUU*AmU*mU |
| | | CCUUCUGGCAUCGUUUAUU | | |
| G021237 | 195 | GGGGCCAGCUUCAGACACAAAU | 395 | mG*mGGGCCAGCmUUCmAGACACAAAUACmGUUGmUmAmGmCUCCCm |
| | | ACGUUGUAGCUCCCUGAAACCG | | UmGmAmAmAmCmCGUUmGmCUAmCAAU*AAGmGmCCmGmUmCmGmA |
| | | UUGCUACAAUAAGGCCGUCGAA | | mAmAmGmAmUGUGCmCGCmAmAmCmGCUCUmGmCCmUmUmCmUGmG |
| | | AGAUGUGCCGCAACGCUCUGCC | | CmAmUC*mG*mU*mU |
| | | UUCUGGCAUCGUU | | |
| G021238 | 196 | UUUUCACAGCCAACGACUCUGG | 396 | mU*mUUUCACAGmCCAmACGACUCUGGCCmGUUGmUmAmGmCUCCCm |
| | | CCGUUGUAGCUCCCUGAAACCG | | UmGmAmAmAmCmCGUUmGmCUAmCAAU*AAGmGmCCmGmUmCmGmA |
| | | UUGCUACAAUAAGGCCGUCGAA | | mAmAmGmAmUGUGCmCGCmAmAmCmGCUCUmGmCCmUmUmCmUGmG |
| | | AGAUGUGCCGCAACGCUCUGCC | | CmAmUC*mG*mU*mU |
| | | UUCUGGCAUCGUU | | |
| G021239 | 197 | CAUCAGAGGACAUUUGGAUUCU | 397 | mC*mAUCAGAGGmACAmUUUGGAUUCUCCmGUUGmUmAmGmCUCCCm |
| | | CCGUUGUAGCUCCCUGAAACCG | | UmGmAmAmAmCmCGUUmGmCUAmCAAU*AAGmGmCCmGmUmCmGmA |
| | | UUGCUACAAUAAGGCCGUCGAA | | mAmAmGmAmUGUGCmCGCmAmAmCmGCUCUmGmCCmUmUmCmUGmG |
| | | AGAUGUGCCGCAACGCUCUGCC | | CmAmUC*mG*mU*mU |
| | | UUCUGGCAUCGUU | | |
| G021240 | 198 | CAUGGAACGGGGAAAUGCCAAG | 398 | mC*mAUGGAACGmGGGmAAAUGCCAAGUGmGUUGmUmAmGmCUCCCm |
| | | UGGUUGUAGCUCCCUGAAACCG | | UmGmAmAmAmCmCGUUmGmCUAmCAAU*AAGmGmCCmGmUmCmGmA |
| | | UUGCUACAAUAAGGCCGUCGAA | | mAmAmGmAmUGUGCmCGCmAmAmCmGCUCUmGmCCmUmUmCmUGmG |
| | | AGAUGUGCCGCAACGCUCUGCC | | CmAmUC*mG*mU*mU |
| | | UUCUGGCAUCGUU | | |
| G021241 | 199 | AAAUCGUACUGGAAGACACUUG | 399 | mA*mAAUCGUACmUGGmAAGACACUUGGCmGUUGmUmAmGmCUCCCm |
| | | GCGUUGUAGCUCCCUGAAACCG | | UmGmAmAmAmCmCGUUmGmCUAmCAAU*AAGmGmCCmGmUmCmGmA |
| | | UUGCUACAAUAAGGCCGUCGAA | | mAmAmGmAmUGUGCmCGCmAmAmCmGCUCUmGmCCmUmUmCmUGmG |
| | | AGAUGUGCCGCAACGCUCUGCC | | CmAmUC*mG*mU*mU |
| | | UUCUGGCAUCGUU | | |
| G021242 | 200 | AAUCGUACUGGAAGACACUUGG | 400 | mA*mAUCGUACUmGGAmAGACACUUGGCAmGUUGmUmAmGmCUCCCm |
| | | CAGUUGUAGCUCCCUGAAACCG | | UmGmAmAmAmCmCGUUmGmCUAmCAAU*AAGmGmCCmGmUmCmGmA |
| | | UUGCUACAAUAAGGCCGUCGAA | | mAmAmGmAmUGUGCmCGCmAmAmCmGCUCUmGmCCmUmUmCmUGmG |
| | | AGAUGUGCCGCAACGCUCUGCC | | CmAmUC*mG*mU*mU |
| | | UUCUGGCAUCGUU | | |
| G021243 | 201 | UCUGGCCAUCGCCACUACACCA | 401 | mU*mCUGGCCAUmCGCmCACUACACCAUCmGUUGmUmAmGmCUCCCm |
| | | UCGUUGUAGCUCCCUGAAACCG | | UmGmAmAmAmCmCGUUmGmCUAmCAAU*AAGmGmCCmGmUmCmGmA |
| | | UUGCUACAAUAAGGCCGUCGAA | | mAmAmGmAmUGUGCmCGCmAmAmCmGCUCUmGmCCmUmUmCmUGmG |
| | | AGAUGUGCCGCAACGCUCUGCC | | CmAmUC*mG*mU*mU |
| | | UUCUGGCAUCGUU | | |
| G021244 | 202 | CUGGCCAUCGCCACUACACCAU | 402 | mC*mUGGCCAUCmGCCmACUACACCAUCGmGUUGmUmAmGmCUCCCm |
| | | CGGUUGUAGCUCCCUGAAACCG | | UmGmAmAmAmCmCGUUmGmCUAmCAAU*AAGmGmCCmGmUmCmGmA |
| | | UUGCUACAAUAAGGCCGUCGAA | | mAmAmGmAmUGUGCmCGCmAmAmCmGCUCUmGmCCmUmUmCmUGmG |
| | | AGAUGUGCCGCAACGCUCUGCC | | CmAmUC*mG*mU*mU |
| | | UUCUGGCAUCGUU | | |
| G021245 | 203 | ACCAUCGCAGCCCUGCUCAGCC | 403 | mA*mCCAUCGCAmGCCmCUGCUCAGCCCAmGUUGmUmAmGmCUCCCmU |
| | | CAGUUGUAGCUCCCUGAAACCG | | mGmAmAmAmCmCGUUmGmCUAmCAAU*AAGmGmCCmGmUmCmGmAm |
| | | UUGCUACAAUAAGGCCGUCGAA | | AmAmGmAmUGUGCmCGCmAmAmCmGCUCUmGmCCmUmUmCmUGmGC |
| | | AGAUGUGCCGCAACGCUCUGCC | | mAmUC*mG*mU*mU |
| | | UUCUGGCAUCGUU | | |
| G021246 | 204 | UGGACUGGUAUUUGUGUCUGAA | 404 | mU*mGGACUGGUmAUUmUGUGUCUGAAGCmGUUGmUmAmGmCUCCCm |
| | | GCGUUGUAGCUCCCUGAAACCG | | UmGmAmAmAmCmCGUUmGmCUAmCAAU*AAGmGmCCmGmUmCmGmA |
| | | UUGCUACAAUAAGGCCGUCGAA | | mAmAmGmAmUGUGCmCGCmAmAmCmGCUCUmGmCCmUmUmCmUGmG |
| | | AGAUGUGCCGCAACGCUCUGCC | | CmAmUC*mG*mU*mU |
| | | UUCUGGCAUCGUU | | |
| G021247 | 205 | CUGCCUCGGACAGCAUCCAGGA | 405 | mC*mUGCCUCGGmACAmGCAUCCAGGACUmGUUGmUmAmGmCUCCCm |
| | | CUGUUGUAGCUCCCUGAAACCG | | UmGmAmAmAmCmCGUUmGmCUAmCAAU*AAGmGmCCmGmUmCmGmA |
| | | UUGCUACAAUAAGGCCGUCGAA | | mAmAmGmAmUGUGCmCGCmAmAmCmGCUCUmGmCCmUmUmCmUGmG |
| | | AGAUGUGCCGCAACGCUCUGCC | | CmAmUC*mG*mU*mU |
| | | UUCUGGCAUCGUU | | |
| G021248 | 206 | CUACAAGCUUACCCAGAGGCAA | 406 | mC*mUACAAGCUmUACmCCAGAGGCAAAGmGUUGmUmAmGmCUCCCm |
| | | AGGUUGUAGCUCCCUGAAACCG | | UmGmAmAmAmCmCGUUmGmCUAmCAAU*AAGmGmCCmGmUmCmGmA |
| | | UUGCUACAAUAAGGCCGUCGAA | | mAmAmGmAmUGUGCmCGCmAmAmCmGCUCUmGmCCmUmUmCmUGmG |
| | | AGAUGUGCCGCAACGCUCUGCC | | CmAmUC*mG*mU*mU |
| | | UUCUGGCAUCGUU | | |
| G021249 | 207 | CAGAAUUGAGAGACUCAGCCCA | 407 | mC*mAGAAUUGAmGAGmACUCAGCCCAGGmGUUGmUmAmGmCUCCCm |
| | | GGGUUGUAGCUCCCUGAAACCG | | UmGmAmAmAmCmCGUUmGmCUAmCAAU*AAGmGmCCmGmUmCmGmA |
| | | UUGCUACAAUAAGGCCGUCGAA | | mAmAmGmAmUGUGCmCGCmAmAmCmGCUCUmGmCCmUmUmCmUGmG |
| | | AGAUGUGCCGCAACGCUCUGCC | | CmAmUC*mG*mU*mU |
| | | UUCUGGCAUCGUU | | |
| G021250 | 208 | GAUCCACAAGCUCCUGACAGGA | 408 | mG*mAUCCACAAmGCUmCCUGACAGGAUGmGUUGmUmAmGmCUCCCm |
| | | UGGUUGUAGCUCCCUGAAACCG | | UmGmAmAmAmCmCGUUmGmCUAmCAAU*AAGmGmCCmGmUmCmGmA |
| | | UUGCUACAAUAAGGCCGUCGAA | | mAmAmGmAmUGUGCmCGCmAmAmCmGCUCUmGmCCmUmUmCmUGmG |
| | | AGAUGUGCCGCAACGCUCUGCC | | CmAmUC*mG*mU*mU |
| | | UUCUGGCAUCGUU | | |
| G021251 | 209 | AUCCACAAGCUCCUGACAGGAU | 409 | mA*mUCCACAAGmCUCmCUGACAGGAUGGmGUUGmUmAmGmCUCCCm |
| | | GGGUUGUAGCUCCCUGAAACCG | | UmGmAmAmAmCmCGUUmGmCUAmCAAU*AAGmGmCCmGmUmCmGmA |
| | | UUGCUACAAUAAGGCCGUCGAA | | mAmAmGmAmUGUGCmCGCmAmAmCmGCUCUmGmCCmUmUmCmUGmG |
| | | AGAUGUGCCGCAACGCUCUGCC | | CmAmUC*mG*mU*mU |
| | | UUCUGGCAUCGUU | | |
| G021252 | 210 | GGACUGGUAUUUGUGUCUGAAG | 410 | mG*mGACUGGUAmUUUmGUGUCUGAAGCUmGUUGmUmAmGmCUCCCm |
| | | CUGUUGUAGCUCCCUGAAACCG | | UmGmAmAmAmCmCGUUmGmCUAmCAAU*AAGmGmCCmGmUmCmGmA |
| | | UUGCUACAAUAAGGCCGUCGAA | | mAmAmGmAmUGUGCmCGCmAmAmCmGCUCUmGmCCmUmUmCmUGmG |
| | | AGAUGUGCCGCAACGCUCUGCC | | CmAmUC*mG*mU*mU |
| | | UUCUGGCAUCGUU | | |
| G021253 | 211 | UGCUGAUCCCUGCCAAGCUGAC | 411 | mU*mGCUGAUCCmCUGmCCAAGCUGACUCmGUUGmUmAmGmCUCCCm |
| | | UCGUUGUAGCUCCCUGAAACCG | | UmGmAmAmAmCmCGUUmGmCUAmCAAU*AAGmGmCCmGmUmCmGmA |
| | | UUGCUACAAUAAGGCCGUCGAA | | mAmAmGmAmUGUGCmCGCmAmAmCmGCUCUmGmCCmUmUmCmUGmG |
| | | AGAUGUGCCGCAACGCUCUGCC | | CmAmUC*mG*mU*mU |
| | | UUCUGGCAUCGUU | | |
| G021254 | 212 | CAGCAACCCCCAGAAUUGAGAG | 412 | mC*mAGCAACCCmCCAmGAAUUGAGAGACmGUUGmUmAmGmCUCCCm |
| | | ACGUUGUAGCUCCCUGAAACCG | | UmGmAmAmAmCmCGUUmGmCUAmCAAU*AAGmGmCCmGmUmCmGmA |
| | | UUGCUACAAUAAGGCCGUCGAA | | mAmAmGmAmUGUGCmCGCmAmAmCmGCUCUmGmCCmUmUmCmUGmG |
| | | AGAUGUGCCGCAACGCUCUGCC | | CmAmUC*mG*mU*mU |
| | | UUCUGGCAUCGUU | | |
| G021255 | 213 | GCUUCUCCUGGUGAAGGGGCUU | 413 | mG*mCUUCUCCUmGGUmGAAGGGGCUUUUmGUUGmUmAmGmCUCCCm |
| | | UUGUUGUAGCUCCCUGAAACCG | | UmGmAmAmAmCmCGUUmGmCUAmCAAU*AAGmGmCCmGmUmCmGmA |
| | | UUGCUACAAUAAGGCCGUCGAA | | mAmAmGmAmUGUGCmCGCmAmAmCmGCUCUmGmCCmUmUmCmUGmG |
| | | AGAUGUGCCGCAACGCUCUGCC | | CmAmUC*mG*mU*mU |
| | | UUCUGGCAUCGUU | | |
| G021256 | 214 | CCAAGUGUCUUCCAGUACGAUU | 414 | mC*mCAAGUGUCmUUCmCAGUACGAUUUGmGUUGmUmAmGmCUCCCm |
| | | UGGUUGUAGCUCCCUGAAACCG | | UmGmAmAmAmCmCGUUmGmCUAmCAAU*AAGmGmCCmGmUmCmGmA |
| | | UUGCUACAAUAAGGCCGUCGAA | | mAmAmGmAmUGUGCmCGCmAmAmCmGCUCUmGmCCmUmUmCmUGmG |
| | | AGAUGUGCCGCAACGCUCUGCC | | CmAmUC*mG*mU*mU |
| | | UUCUGGCAUCGUU | | |
| G021257 | 215 | CGAUGGCCAGAGUCGUUGGCUG | 415 | mC*mGAUGGCCAmGAGmUCGUUGGCUGUGmGUUGmUmAmGmCUCCCm |
| | | UGGUUGUAGCUCCCUGAAACCG | | UmGmAmAmAmCmCGUUmGmCUAmCAAU*AAGmGmCCmGmUmCmGmA |
| | | UUGCUACAAUAAGGCCGUCGAA | | mAmAmGmAmUGUGCmCGCmAmAmCmGCUCUmGmCCmUmUmCmUGmG |
| | | AGAUGUGCCGCAACGCUCUGCC | | CmAmUC*mG*mU*mU |
| | | UUCUGGCAUCGUU | | |
| G021258 | 216 | GUUUAAUAAGAAUGCUUCACGG | 416 | mG*mUUUAAUAAmGAAmUGCUUCACGGCAmGUUGmUmAmGmCUCCCm |
| | | CAGUUGUAGCUCCCUGAAACCG | | UmGmAmAmAmCmCGUUmGmCUAmCAAU*AAGmGmCCmGmUmCmGmA |
| | | UUGCUACAAUAAGGCCGUCGAA | | mAmAmGmAmUGUGCmCGCmAmAmCmGCUCUmGmCCmUmUmCmUGmG |
| | | AGAUGUGCCGCAACGCUCUGCC | | CmAmUC*mG*mU*mU |
| | | UUCUGGCAUCGUU | | |
| G021259 | 217 | UUGGAGUCAGCUUGGCAGGGAU | 417 | mU*mUGGAGUCAmGCUmUGGCAGGGAUCAmGUUGmUmAmGmCUCCCm |
| | | CAGUUGUAGCUCCCUGAAACCG | | UmGmAmAmAmCmCGUUmGmCUAmCAAU*AAGmGmCCmGmUmCmGmA |
| | | UUGCUACAAUAAGGCCGUCGAA | | mAmAmGmAmUGUGCmCGCmAmAmCmGCUCUmGmCCmUmUmCmUGmG |
| | | AGAUGUGCCGCAACGCUCUGCC | | CmAmUC*mG*mU*mU |
| | | UUCUGGCAUCGUU | | |
| G021260 | 218 | GGAAGGAGGGGGUAUAAAAGCC | 418 | mG*mGAAGGAGGmGGGmUAUAAAAGCCCCmGUUGmUmAmGmCUCCCm |
| | | CCGUUGUAGCUCCCUGAAACCG | | UmGmAmAmAmCmCGUUmGmCUAmCAAU*AAGmGmCCmGmUmCmGmA |
| | | UUGCUACAAUAAGGCCGUCGAA | | mAmAmGmAmUGUGCmCGCmAmAmCmGCUCUmGmCCmUmUmCmUGmG |
| | | AGAUGUGCCGCAACGCUCUGCC | | CmAmUC*mG*mU*mU |
| | | UUCUGGCAUCGUU | | |
| G021261 | 219 | ACAGGAUGGCUUCCCUUCGACU | 419 | mA*mCAGGAUGGmCUUmCCCUUCGACUCUmGUUGmUmAmGmCUCCCm |
| | | CUGUUGUAGCUCCCUGAAACCG | | UmGmAmAmAmCmCGUUmGmCUAmCAAU*AAGmGmCCmGmUmCmGmA |
| | | UUGCUACAAUAAGGCCGUCGAA | | mAmAmGmAmUGUGCmCGCmAmAmCmGCUCUmGmCCmUmUmCmUGmG |
| | | AGAUGUGCCGCAACGCUCUGCC | | CmAmUC*mG*mU*mU |
| | | UUCUGGCAUCGUU | | |
| G021262 | 220 | CUGGACUGGUAUUUGUGUCUGA | 420 | mC*mUGGACUGGmUAUmUUGUGUCUGAAGmGUUGmUmAmGmCUCCCm |
| | | AGGUUGUAGCUCCCUGAAACCG | | UmGmAmAmAmCmCGUUmGmCUAmCAAU*AAGmGmCCmGmUmCmGmA |
| | | UUGCUACAAUAAGGCCGUCGAA | | mAmAmGmAmUGUGCmCGCmAmAmCmGCUCUmGmCCmUmUmCmUGmG |
| | | AGAUGUGCCGCAACGCUCUGCC | | CmAmUC*mG*mU*mU |
| | | UUCUGGCAUCGUU | | |
| G021263 | 221 | CUCUGAUGGUCAAAGUCCUGGA | 421 | mC*mUCUGAUGGmUCAmAAGUCCUGGAUGmGUUGmUmAmGmCUCCCm |
| | | UGGUUGUAGCUCCCUGAAACCG | | UmGmAmAmAmCmCGUUmGmCUAmCAAU*AAGmGmCCmGmUmCmGmA |
| | | UUGCUACAAUAAGGCCGUCGAA | | mAmAmGmAmUGUGCmCGCmAmAmCmGCUCUmGmCCmUmUmCmUGmG |
| | | AGAUGUGCCGCAACGCUCUGCC | | CmAmUC*mG*mU*mU |
| | | UUCUGGCAUCGUU | | |
| G021264 | 222 | GAAGGAGUGUACAGAGUAGAAC | 422 | mG*mAAGGAGUGmUACmAGAGUAGAACUGmGUUGmUmAmGmCUCCCm |
| | | UGGUUGUAGCUCCCUGAAACCG | | UmGmAmAmAmCmCGUUmGmCUAmCAAU*AAGmGmCCmGmUmCmGmA |
| | | UUGCUACAAUAAGGCCGUCGAA | | mAmAmGmAmUGUGCmCGCmAmAmCmGCUCUmGmCCmUmUmCmUGmG |
| | | AGAUGUGCCGCAACGCUCUGCC | | CmAmUC*mG*mU*mU |
| | | UUCUGGCAUCGUU | | |
| G021265 | 223 | AGGUGGUUUUCACAGCCAACGA | 423 | mA*mGGUGGUUUmUCAmCAGCCAACGACUmGUUGmUmAmGmCUCCCm |
| | | CUGUUGUAGCUCCCUGAAACCG | | UmGmAmAmAmCmCGUUmGmCUAmCAAU*AAGmGmCCmGmUmCmGmA |
| | | UUGCUACAAUAAGGCCGUCGAA | | mAmAmGmAmUGUGCmCGCmAmAmCmGCUCUmGmCCmUmUmCmUGmG |
| | | AGAUGUGCCGCAACGCUCUGCC | | CmAmUC*mG*mU*mU |
| | | UUCUGGCAUCGUU | | |
| G021266 | 224 | GCCAACGACUCUGGCCAUCGCC | 424 | mG*mCCAACGACmUCUmGGCCAUCGCCACmGUUGmUmAmGmCUCCCm |
| | | ACGUUGUAGCUCCCUGAAACCG | | UmGmAmAmAmCmCGUUmGmCUAmCAAU*AAGmGmCCmGmUmCmGmA |
| | | UUGCUACAAUAAGGCCGUCGAA | | mAmAmGmAmUGUGCmCGCmAmAmCmGCUCUmGmCCmUmUmCmUGmG |
| | | AGAUGUGCCGCAACGCUCUGCC | | CmAmUC*mG*mU*mU |
| | | UUCUGGCAUCGUU | | |
| G021267 | 225 | UACAGCACCACGGCUGUCGUCA | 425 | mU*mACAGCACCmACGmGCUGUCGUCAGCmGUUGmUmAmGmCUCCCm |
| | | GCGUUGUAGCUCCCUGAAACCG | | UmGmAmAmAmCmCGUUmGmCUAmCAAU*AAGmGmCCmGmUmCmGmA |
| | | UUGCUACAAUAAGGCCGUCGAA | | mAmAmGmAmUGUGCmCGCmAmAmCmGCUCUmGmCCmUmUmCmUGmG |
| | | AGAUGUGCCGCAACGCUCUGCC | | CmAmUC*mG*mU*mU |
| | | UUCUGGCAUCGUU | | |
| G021268 | 226 | ACAGCACCACGGCUGUCGUCAG | 426 | mA*mCAGCACCAmCGGmCUGUCGUCAGCAmGUUGmUmAmGmCUCCCm |
| | | CAGUUGUAGCUCCCUGAAACCG | | UmGmAmAmAmCmCGUUmGmCUAmCAAU*AAGmGmCCmGmUmCmGmA |
| | | UUGCUACAAUAAGGCCGUCGAA | | mAmAmGmAmUGUGCmCGCmAmAmCmGCUCUmGmCCmUmUmCmUGmG |
| | | AGAUGUGCCGCAACGCUCUGCC | | CmAmUC*mG*mU*mU |
| | | UUCUGGCAUCGUU | | |
| G021269 | 227 | UAAACCGUGUUAGCAGCUCAGG | 427 | mU*mAAACCGUGmUUAmGCAGCUCAGGAAmGUUGmUmAmGmCUCCCm |
| | | AAGUUGUAGCUCCCUGAAACCG | | UmGmAmAmAmCmCGUUmGmCUAmCAAU*AAGmGmCCmGmUmCmGmA |
| | | UUGCUACAAUAAGGCCGUCGAA | | mAmAmGmAmUGUGCmCGCmAmAmCmGCUCUmGmCCmUmUmCmUGmG |
| | | AGAUGUGCCGCAACGCUCUGCC | | CmAmUC*mG*mU*mU |
| | | UUCUGGCAUCGUU | | |
| G021270 | 228 | GAAGAUGCCGUGAAGCAUUCUU | 428 | mG*mAAGAUGCCmGUGmAAGCAUUCUUAUmGUUGmUmAmGmCUCCCm |
| | | AUGUUGUAGCUCCCUGAAACCG | | UmGmAmAmAmCmCGUUmGmCUAmCAAU*AAGmGmCCmGmUmCmGmA |
| | | UUGCUACAAUAAGGCCGUCGAA | | mAmAmGmAmUGUGCmCGCmAmAmCmGCUCUmGmCCmUmUmCmUGmG |
| | | AGAUGUGCCGCAACGCUCUGCC | | CmAmUC*mG*mU*mU |
| | | UUCUGGCAUCGUU | | |
| G021271 | 229 | GAUGCCGUGAAGCAUUCUUAUU | 429 | mG*mAUGCCGUGmAAGmCAUUCUUAUUAAmGUUGmUmAmGmCUCCCm |
| | | AAGUUGUAGCUCCCUGAAACCG | | UmGmAmAmAmCmCGUUmGmCUAmCAAU*AAGmGmCCmGmUmCmGmA |
| | | UUGCUACAAUAAGGCCGUCGAA | | mAmAmGmAmUGUGCmCGCmAmAmCmGCUCUmGmCCmUmUmCmUGmG |
| | | AGAUGUGCCGCAACGCUCUGCC | | CmAmUC*mG*mU*mU |
| | | UUCUGGCAUCGUU | | |
| G021272 | 23 | UCCUGGUGAAGGGGCUUUUAUA | 430 | mU*mCCUGGUGAmAGGmGGCUUUUAUACCmGUUGmUmAmGmCUCCCm |
| | | CCGUUGUAGCUCCCUGAAACCG | | UmGmAmAmAmCmCGUUmGmCUAmCAAU*AAGmGmCCmGmUmCmGmA |
| | | UUGCUACAAUAAGGCCGUCGAA | | mAmAmGmAmUGUGCmCGCmAmAmCmGCUCUmGmCCmUmUmCmUGmG |
| | | AGAUGUGCCGCAACGCUCUGCC | | CmAmUC*mG*mU*mU |
| | | UUCUGGCAUCGUU | | |
| G021273 | 231 | UUCUCCUGGUGAAGGGGCUUUU | 431 | mU*mUCUCCUGGmUGAmAGGGGCUUUUAUmGUUGmUmAmGmCUCCCm |
| | | AUGUUGUAGCUCCCUGAAACCG | | UmGmAmAmAmCmCGUUmGmCUAmCAAU*AAGmGmCCmGmUmCmGmA |
| | | UUGCUACAAUAAGGCCGUCGAA | | mAmAmGmAmUGUGCmCGCmAmAmCmGCUCUmGmCCmUmUmCmUGmG |
| | | AGAUGUGCCGCAACGCUCUGCC | | CmAmUC*mG*mU*mU |
| | | UUCUGGCAUCGUU | | |
| G021274 | 232 | CUUCUCCUGGUGAAGGGGCUUU | 432 | mC*mUUCUCCUGmGUGmAAGGGGCUUUUAmGUUGmUmAmGmCUCCCm |
| | | UAGUUGUAGCUCCCUGAAACCG | | UmGmAmAmAmCmCGUUmGmCUAmCAAU*AAGmGmCCmGmUmCmGmA |
| | | UUGCUACAAUAAGGCCGUCGAA | | mAmAmGmAmUGUGCmCGCmAmAmCmGCUCUmGmCCmUmUmCmUGmG |
| | | AGAUGUGCCGCAACGCUCUGCC | | CmAmUC*mG*mU*mU |
| | | UUCUGGCAUCGUU | | |
| G021275 | 233 | UCUACAGCAGGGCUGCCUCGGA | 433 | mU*mCUACAGCAmGGGmCUGCCUCGGACAmGUUGmUmAmGmCUCCCm |
| | | CAGUUGUAGCUCCCUGAAACCG | | UmGmAmAmAmCmCGUUmGmCUAmCAAU*AAGmGmCCmGmUmCmGmA |
| | | UUGCUACAAUAAGGCCGUCGAA | | mAmAmGmAmUGUGCmCGCmAmAmCmGCUCUmGmCCmUmUmCmUGmG |
| | | AGAUGUGCCGCAACGCUCUGCC | | CmAmUC*mG*mU*mU |
| | | UUCUGGCAUCGUU | | |
| G021276 | 234 | UUUGGUGUCCAGUUCUACUCUG | 434 | mU*mUUGGUGUCmCAGmUUCUACUCUGUAmGUUGmUmAmGmCUCCCm |
| | | UAGUUGUAGCUCCCUGAAACCG | | UmGmAmAmAmCmCGUUmGmCUAmCAAU*AAGmGmCCmGmUmCmGmA |
| | | UUGCUACAAUAAGGCCGUCGAA | | mAmAmGmAmUGUGCmCGCmAmAmCmGCUCUmGmCCmUmUmCmUGmG |
| | | AGAUGUGCCGCAACGCUCUGCC | | CmAmUC*mG*mU*mU |
| | | UUCUGGCAUCGUU | | |
| G021277 | 235 | CAGGGCUGCGAUGGUGUAGUGG | 435 | mC*mAGGGCUGCmGAUmGGUGUAGUGGCGmGUUGmUmAmGmCUCCCm |
| | | CGGUUGUAGCUCCCUGAAACCG | | UmGmAmAmAmCmCGUUmGmCUAmCAAU*AAGmGmCCmGmUmCmGmA |
| | | UUGCUACAAUAAGGCCGUCGAA | | mAmAmGmAmUGUGCmCGCmAmAmCmGCUCUmGmCCmUmUmCmUGmG |
| | | AGAUGUGCCGCAACGCUCUGCC | | CmAmUC*mG*mU*mU |
| | | UUCUGGCAUCGUU | | |
| G021278 | 236 | GAUGCUACUGCUUUGGCAAGAU | 436 | mG*mAUGCUACUmGCUmUUGGCAAGAUCCmGUUGmUmAmGmCUCCCm |
| | | CCGUUGUAGCUCCCUGAAACCG | | UmGmAmAmAmCmCGUUmGmCUAmCAAU*AAGmGmCCmGmUmCmGmA |
| | | UUGCUACAAUAAGGCCGUCGAA | | mAmAmGmAmUGUGCmCGCmAmAmCmGCUCUmGmCCmUmUmCmUGmG |
| | | AGAUGUGCCGCAACGCUCUGCC | | CmAmUC*mG*mU*mU |
| | | UUCUGGCAUCGUU | | |
| G021279 | 237 | CUGACAGGAUGGCUUCCCUUCG | 437 | mC*mUGACAGGAmUGGmCUUCCCUUCGACmGUUGmUmAmGmCUCCCm |
| | | ACGUUGUAGCUCCCUGAAACCG | | UmGmAmAmAmCmCGUUmGmCUAmCAAU*AAGmGmCCmGmUmCmGmA |
| | | UUGCUACAAUAAGGCCGUCGAA | | mAmAmGmAmUGUGCmCGCmAmAmCmGCUCUmGmCCmUmUmCmUGmG |
| | | AGAUGUGCCGCAACGCUCUGCC | | CmAmUC*mG*mU*mU |
| | | UUCUGGCAUCGUU | | |
| G021280 | 238 | GCGGAGUCUGGAGAGCUGCACG | 438 | mG*mCGGAGUCUmGGAmGAGCUGCACGGGmGUUGmUmAmGmCUCCCm |
| | | GGGUUGUAGCUCCCUGAAACCG | | UmGmAmAmAmCmCGUUmGmCUAmCAAU*AAGmGmCCmGmUmCmGmA |
| | | UUGCUACAAUAAGGCCGUCGAA | | mAmAmGmAmUGUGCmCGCmAmAmCmGCUCUmGmCCmUmUmCmUGmG |
| | | AGAUGUGCCGCAACGCUCUGCC | | CmAmUC*mG*mU*mU |
| | | UUCUGGCAUCGUU | | |
| G021281 | 239 | GCCACUACACCAUCGCAGCCCU | 439 | mG*mCCACUACAmCCAmUCGCAGCCCUGCmGUUGmUmAmGmCUCCCmU |
| | | GCGUUGUAGCUCCCUGAAACCG | | mGmAmAmAmCmCGUUmGmCUAmCAAU*AAGmGmCCmGmUmCmGmAm |
| | | UUGCUACAAUAAGGCCGUCGAA | | AmAmGmAmUGUGCmCGCmAmAmCmGCUCUmGmCCmUmUmCmUGmGC |
| | | AGAUGUGCCGCAACGCUCUGCC | | mAmUC*mG*mU*mU |
| | | UUCUGGCAUCGUU | | |
| G021282 | 240 | CCUACAGCACCACGGCUGUCGU | 440 | mC*mCUACAGCAmCCAmCGGCUGUCGUCAmGUUGmUmAmGmCUCCCm |
| | | CAGUUGUAGCUCCCUGAAACCG | | UmGmAmAmAmCmCGUUmGmCUAmCAAU*AAGmGmCCmGmUmCmGmA |
| | | UUGCUACAAUAAGGCCGUCGAA | | mAmAmGmAmUGUGCmCGCmAmAmCmGCUCUmGmCCmUmUmCmUGmG |
| | | AGAUGUGCCGCAACGCUCUGCC | | CmAmUC*mG*mU*mU |
| | | UUCUGGCAUCGUU | | |
| G021283 | 241 | CUACAGCACCACGGCUGUCGUC | 441 | mC*mUACAGCACmCACmGGCUGUCGUCAGmGUUGmUmAmGmCUCCCm |
| | | AGGUUGUAGCUCCCUGAAACCG | | UmGmAmAmAmCmCGUUmGmCUAmCAAU*AAGmGmCCmGmUmCmGmA |
| | | UUGCUACAAUAAGGCCGUCGAA | | mAmAmGmAmUGUGCmCGCmAmAmCmGCUCUmGmCCmUmUmCmUGmG |
| | | AGAUGUGCCGCAACGCUCUGCC | | CmAmUC*mG*mU*mU |
| | | UUCUGGCAUCGUU | | |
| G021284 | 242 | CCCCCUCCUUCCAACCCAGGCU | 442 | mC*mCCCCUCCUmUCCmAACCCAGGCUGCmGUUGmUmAmGmCUCCCmU |
| | | GCGUUGUAGCUCCCUGAAACCG | | mGmAmAmAmCmCGUUmGmCUAmCAAU*AAGmGmCCmGmUmCmGmAm |
| | | UUGCUACAAUAAGGCCGUCGAA | | AmAmGmAmUGUGCmCGCmAmAmCmGCUCUmGmCCmUmUmCmUGmGC |
| | | AGAUGUGCCGCAACGCUCUGCC | | mAmUC*mG*mU*mU |
| | | UUCUGGCAUCGUU | | |
| G021285 | 243 | AAGGGGCUUUUAUACCCCCUCC | 443 | mA*mAGGGGCUUmUUAmUACCCCCUCCUUmGUUGmUmAmGmCUCCCm |
| | | UUGUUGUAGCUCCCUGAAACCG | | UmGmAmAmAmCmCGUUmGmCUAmCAAU*AAGmGmCCmGmUmCmGmA |
| | | UUGCUACAAUAAGGCCGUCGAA | | mAmAmGmAmUGUGCmCGCmAmAmCmGCUCUmGmCCmUmUmCmUGmG |
| | | AGAUGUGCCGCAACGCUCUGCC | | CmAmUC*mG*mU*mU |
| | | UUCUGGCAUCGUU | | |
| G021286 | 244 | GAGCUUGUGGAUCUGUGUGACG | 444 | mG*mAGCUUGUGmGAUmCUGUGUGACGGCmGUUGmUmAmGmCUCCCm |
| | | GCGUUGUAGCUCCCUGAAACCG | | UmGmAmAmAmCmCGUUmGmCUAmCAAU*AAGmGmCCmGmUmCmGmA |
| | | UUGCUACAAUAAGGCCGUCGAA | | mAmAmGmAmUGUGCmCGCmAmAmCmGCUCUmGmCCmUmUmCmUGmG |
| | | AGAUGUGCCGCAACGCUCUGCC | | CmAmUC*mG*mU*mU |
| | | UUCUGGCAUCGUU | | |
| G021287 | 245 | ACCGCGGGGCCAGCUUCAGACA | 445 | mA*mCCGCGGGGmCCAmGCUUCAGACACAmGUUGmUmAmGmCUCCCm |
| | | CAGUUGUAGCUCCCUGAAACCG | | UmGmAmAmAmCmCGUUmGmCUAmCAAU*AAGmGmCCmGmUmCmGmA |
| | | UUGCUACAAUAAGGCCGUCGAA | | mAmAmGmAmUGUGCmCGCmAmAmCmGCUCUmGmCCmUmUmCmUGmG |
| | | AGAUGUGCCGCAACGCUCUGCC | | CmAmUC*mG*mU*mU |
| | | UUCUGGCAUCGUU | | |
| G021288 | 246 | AUCGCUCACAGGAUCACUCACC | 446 | mA*mUCGCUCACmAGGmAUCACUCACCGCmGUUGmUmAmGmCUCCCm |
| | | GCGUUGUAGCUCCCUGAAACCG | | UmGmAmAmAmCmCGUUmGmCUAmCAAU*AAGmGmCCmGmUmCmGmA |
| | | UUGCUACAAUAAGGCCGUCGAA | | mAmAmGmAmUGUGCmCGCmAmAmCmGCUCUmGmCCmUmUmCmUGmG |
| | | AGAUGUGCCGCAACGCUCUGCC | | CmAmUC*mG*mU*mU |
| | | UUCUGGCAUCGUU | | |
| G021289 | 247 | UUUUACAGCCACGUCUACAGCA | 447 | mU*mUUUACAGCmCACmGUCUACAGCAGGmGUUGmUmAmGmCUCCCm |
| | | GGGUUGUAGCUCCCUGAAACCG | | UmGmAmAmAmCmCGUUmGmCUAmCAAU*AAGmGmCCmGmUmCmGmA |
| | | UUGCUACAAUAAGGCCGUCGAA | | mAmAmGmAmUGUGCmCGCmAmAmCmGCUCUmGmCCmUmUmCmUGmG |
| | | AGAUGUGCCGCAACGCUCUGCC | | CmAmUC*mG*mU*mU |
| | | UUCUGGCAUCGUU | | |
| G021290 | 248 | UCCCAUGGUGGGCUUUCUACAA | 448 | mU*mCCCAUGGUmGGGmCUUUCUACAAGCmGUUGmUmAmGmCUCCCm |
| | | GCGUUGUAGCUCCCUGAAACCG | | UmGmAmAmAmCmCGUUmGmCUAmCAAU*AAGmGmCCmGmUmCmGmA |
| | | UUGCUACAAUAAGGCCGUCGAA | | mAmAmGmAmUGUGCmCGCmAmAmCmGCUCUmGmCCmUmUmCmUGmG |
| | | AGAUGUGCCGCAACGCUCUGCC | | CmAmUC*mG*mU*mU |
| | | UUCUGGCAUCGUU | | |
| G021291 | 249 | GUGGUGAGCCCGUGCAGCUCUC | 449 | mG*mUGGUGAGCmCCGmUGCAGCUCUCCAmGUUGmUmAmGmCUCCCm |
| | | CAGUUGUAGCUCCCUGAAACCG | | UmGmAmAmAmCmCGUUmGmCUAmCAAU*AAGmGmCCmGmUmCmGmA |
| | | UUGCUACAAUAAGGCCGUCGAA | | mAmAmGmAmUGUGCmCGCmAmAmCmGCUCUmGmCCmUmUmCmUGmG |
| | | AGAUGUGCCGCAACGCUCUGCC | | CmAmUC*mG*mU*mU |
| | | UUCUGGCAUCGUU | | |
| G021292 | 250 | CUCAUCUGUGGUGAGCCCGUGC | 450 | mC*mUCAUCUGUmGGUmGAGCCCGUGCAGmGUUGmUmAmGmCUCCCm |
| | | AGGUUGUAGCUCCCUGAAACCG | | UmGmAmAmAmCmCGUUmGmCUAmCAAU*AAGmGmCCmGmUmCmGmA |
| | | UUGCUACAAUAAGGCCGUCGAA | | mAmAmGmAmUGUGCmCGCmAmAmCmGCUCUmGmCCmUmUmCmUGmG |
| | | AGAUGUGCCGCAACGCUCUGCC | | CmAmUC*mG*mU*mU |
| | | UUCUGGCAUCGUU | | |
| G021293 | 251 | UUCUACAAACUUCUCAUCUGUG | 451 | mU*mUCUACAAAmCUUmCUCAUCUGUGGUmGUUGmUmAmGmCUCCCm |
| | | GUGUUGUAGCUCCCUGAAACCG | | UmGmAmAmAmCmCGUUmGmCUAmCAAU*AAGmGmCCmGmUmCmGmA |
| | | UUGCUACAAUAAGGCCGUCGAA | | mAmAmGmAmUGUGCmCGCmAmAmCmGCUCUmGmCCmUmUmCmUGmG |
| | | AGAUGUGCCGCAACGCUCUGCC | | CmAmUC*mG*mU*mU |
| | | UUCUGGCAUCGUU | | |
| G021294 | 252 | CUUCUACAAACUUCUCAUCUGU | 452 | mC*mUUCUACAAmACUmUCUCAUCUGUGGmGUUGmUmAmGmCUCCCm |
| | | GGGUUGUAGCUCCCUGAAACCG | | UmGmAmAmAmCmCGUUmGmCUAmCAAU*AAGmGmCCmGmUmCmGmA |
| | | UUGCUACAAUAAGGCCGUCGAA | | mAmAmGmAmUGUGCmCGCmAmAmCmGCUCUmGmCCmUmUmCmUGmG |
| | | AGAUGUGCCGCAACGCUCUGCC | | CmAmUC*mG*mU*mU |
| | | UUCUGGCAUCGUU | | |
| G021295 | 253 | AUCCGCGAAUUCAUGGAACGGG | 453 | mA*mUCCGCGAAmUUCmAUGGAACGGGGAmGUUGmUmAmGmCUCCCm |
| | | GAGUUGUAGCUCCCUGAAACCG | | UmGmAmAmAmCmCGUUmGmCUAmCAAU*AAGmGmCCmGmUmCmGmA |
| | | UUGCUACAAUAAGGCCGUCGAA | | mAmAmGmAmUGUGCmCGCmAmAmCmGCUCUmGmCCmUmUmCmUGmG |
| | | AGAUGUGCCGCAACGCUCUGCC | | CmAmUC*mG*mU*mU |
| | | UUCUGGCAUCGUU | | |
| G021296 | 254 | CCAAACAACUUGGUGUGUCCAC | 454 | mC*mCAAACAACmUUGmGUGUGUCCACUUmGUUGmUmAmGmCUCCCm |
| | | UUGUUGUAGCUCCCUGAAACCG | | UmGmAmAmAmCmCGUUmGmCUAmCAAU*AAGmGmCCmGmUmCmGmA |
| | | UUGCUACAAUAAGGCCGUCGAA | | mAmAmGmAmUGUGCmCGCmAmAmCmGCUCUmGmCCmUmUmCmUGmG |
| | | AGAUGUGCCGCAACGCUCUGCC | | CmAmUC*mG*mU*mU |
| | | UUCUGGCAUCGUU | | |
| G021297 | 255 | UCUCAAUUCUGGGGGUUGCUGA | 455 | mU*mCUCAAUUCmUGGmGGGUUGCUGACGmGUUGmUmAmGmCUCCCm |
| | | CGGUUGUAGCUCCCUGAAACCG | | UmGmAmAmAmCmCGUUmGmCUAmCAAU*AAGmGmCCmGmUmCmGmA |
| | | UUGCUACAAUAAGGCCGUCGAA | | mAmAmGmAmUGUGCmCGCmAmAmCmGCUCUmGmCCmUmUmCmUGmG |
| | | AGAUGUGCCGCAACGCUCUGCC | | CmAmUC*mG*mU*mU |
| | | UUCUGGCAUCGUU | | |
| G021298 | 256 | GCUACUGCUUUGGCAAGAUCCU | 456 | mG*mCUACUGCUmUUGmGCAAGAUCCUGGmGUUGmUmAmGmCUCCCm |
| | | GGGUUGUAGCUCCCUGAAACCG | | UmGmAmAmAmCmCGUUmGmCUAmCAAU*AAGmGmCCmGmUmCmGmA |
| | | UUGCUACAAUAAGGCCGUCGAA | | mAmAmGmAmUGUGCmCGCmAmAmCmGCUCUmGmCCmUmUmCmUGmG |
| | | AGAUGUGCCGCAACGCUCUGCC | | CmAmUC*mG*mU*mU |
| | | UUCUGGCAUCGUU | | |
| G021299 | 257 | UUCUUUCUUUAAAAAGUUUGAU | 457 | mU*mUCUUUCUUmUAAmAAAGUUUGAUCGmGUUGmUmAmGmCUCCCm |
| | | CGGUUGUAGCUCCCUGAAACCG | | UmGmAmAmAmCmCGUUmGmCUAmCAAU*AAGmGmCCmGmUmCmGmA |
| | | UUGCUACAAUAAGGCCGUCGAA | | mAmAmGmAmUGUGCmCGCmAmAmCmGCUCUmGmCCmUmUmCmUGmG |
| | | | | CmAmUC*mG*mU*mU |
| | | AGAUGUGCCGCAACGCUCUGCC | | |
| | | UUCUGGCAUCGUU | | |
| G021300 | 258 | CCAUGACCUCCCCAAGAUGGAA | 458 | mC*mCAUGACCUmCCCmCAAGAUGGAAAGmGUUGmUmAmGmCUCCCm |
| | | AGGUUGUAGCUCCCUGAAACCG | | UmGmAmAmAmCmCGUUmGmCUAmCAAU*AAGmGmCCmGmUmCmGmA |
| | | UUGCUACAAUAAGGCCGUCGAA | | mAmAmGmAmUGUGCmCGCmAmAmCmGCUCUmGmCCmUmUmCmUGmG |
| | | AGAUGUGCCGCAACGCUCUGCC | | CmAmUC*mG*mU*mU |
| | | UUCUGGCAUCGUU | | |
| G021301 | 259 | GCAAGUUGCCAGGAGCACCCAU | 459 | mG*mCAAGUUGCmCAGmGAGCACCCAUGAmGUUGmUmAmGmCUCCCm |
| | | GAGUUGUAGCUCCCUGAAACCG | | UmGmAmAmAmCmCGUUmGmCUAmCAAU*AAGmGmCCmGmUmCmGmA |
| | | UUGCUACAAUAAGGCCGUCGAA | | mAmAmGmAmUGUGCmCGCmAmAmCmGCUCUmGmCCmUmUmCmUGmG |
| | | AGAUGUGCCGCAACGCUCUGCC | | CmAmUC*mG*mU*mU |
| | | UUCUGGCAUCGUU | | |
| G021302 | 260 | AGCAAGUUGCCAGGAGCACCCA | 460 | mA*mGCAAGUUGmCCAmGGAGCACCCAUGmGUUGmUmAmGmCUCCCm |
| | | UGGUUGUAGCUCCCUGAAACCG | | UmGmAmAmAmCmCGUUmGmCUAmCAAU*AAGmGmCCmGmUmCmGmA |
| | | UUGCUACAAUAAGGCCGUCGAA | | mAmAmGmAmUGUGCmCGCmAmAmCmGCUCUmGmCCmUmUmCmUGmG |
| | | AGAUGUGCCGCAACGCUCUGCC | | CmAmUC*mG*mU*mU |
| | | UUCUGGCAUCGUU | | |
| G021303 | 261 | UCAAGCAAGUUGCCAGGAGCAC | 461 | mU*mCAAGCAAGmUUGmCCAGGAGCACCCmGUUGmUmAmGmCUCCCm |
| | | CCGUUGUAGCUCCCUGAAACCG | | UmGmAmAmAmCmCGUUmGmCUAmCAAU*AAGmGmCCmGmUmCmGmA |
| | | UUGCUACAAUAAGGCCGUCGAA | | mAmAmGmAmUGUGCmCGCmAmAmCmGCUCUmGmCCmUmUmCmUGmG |
| | | AGAUGUGCCGCAACGCUCUGCC | | CmAmUC*mG*mU*mU |
| | | UUCUGGCAUCGUU | | |
| G021304 | 262 | UCUUCCUCAAGCAAGUUGCCAG | 462 | mU*mCUUCCUCAmAGCmAAGUUGCCAGGAmGUUGmUmAmGmCUCCCm |
| | | GAGUUGUAGCUCCCUGAAACCG | | UmGmAmAmAmCmCGUUmGmCUAmCAAU*AAGmGmCCmGmUmCmGmA |
| | | UUGCUACAAUAAGGCCGUCGAA | | mAmAmGmAmUGUGCmCGCmAmAmCmGCUCUmGmCCmUmUmCmUGmG |
| | | AGAUGUGCCGCAACGCUCUGCC | | CmAmUC*mG*mU*mU |
| | | UUCUGGCAUCGUU | | |
| G021305 | 263 | AUCUUCCUCAAGCAAGUUGCCA | 463 | mA*mUCUUCCUCmAAGmCAAGUUGCCAGGmGUUGmUmAmGmCUCCCm |
| | | GGGUUGUAGCUCCCUGAAACCG | | UmGmAmAmAmCmCGUUmGmCUAmCAAU*AAGmGmCCmGmUmCmGmA |
| | | UUGCUACAAUAAGGCCGUCGAA | | mAmAmGmAmUGUGCmCGCmAmAmCmGCUCUmGmCCmUmUmCmUGmG |
| | | AGAUGUGCCGCAACGCUCUGCC | | CmAmUC*mG*mU*mU |
| | | UUCUGGCAUCGUU | | |
| G021306 | 264 | UGGUCCACUCUGCUUUCUGACC | 464 | mU*mGGUCCACUmCUGmCUUUCUGACCUAmGUUGmUmAmGmCUCCCm |
| | | UAGUUGUAGCUCCCUGAAACCG | | UmGmAmAmAmCmCGUUmGmCUAmCAAU*AAGmGmCCmGmUmCmGmA |
| | | UUGCUACAAUAAGGCCGUCGAA | | mAmAmGmAmUGUGCmCGCmAmAmCmGCUCUmGmCCmUmUmCmUGmG |
| | | AGAUGUGCCGCAACGCUCUGCC | | CmAmUC*mG*mU*mU |
| | | UUCUGGCAUCGUU | | |
| G021307 | 265 | UGAACGGUUGGUCCACUCUGCU | 465 | mU*mGAACGGUUmGGUmCCACUCUGCUUUmGUUGmUmAmGmCUCCCm |
| | | UUGUUGUAGCUCCCUGAAACCG | | UmGmAmAmAmCmCGUUmGmCUAmCAAU*AAGmGmCCmGmUmCmGmA |
| | | UUGCUACAAUAAGGCCGUCGAA | | mAmAmGmAmUGUGCmCGCmAmAmCmGCUCUmGmCCmUmUmCmUGmG |
| | | AGAUGUGCCGCAACGCUCUGCC | | CmAmUC*mG*mU*mU |
| | | UUCUGGCAUCGUU | | |
| G021308 | 266 | CAGAUUGUGUGCUUUUAAUAGC | 466 | mC*mAGAUUGUGmUGCmUUUUAAUAGCUAmGUUGmUmAmGmCUCCCm |
| | | UAGUUGUAGCUCCCUGAAACCG | | UmGmAmAmAmCmCGUUmGmCUAmCAAU*AAGmGmCCmGmUmCmGmA |
| | | UUGCUACAAUAAGGCCGUCGAA | | mAmAmGmAmUGUGCmCGCmAmAmCmGCUCUmGmCCmUmUmCmUGmG |
| | | AGAUGUGCCGCAACGCUCUGCC | | CmAmUC*mG*mU*mU |
| | | UUCUGGCAUCGUU | | |
| G021309 | 267 | UGGGAAAACACUACUGUGCAUC | 467 | mU*mGGGAAAACmACUmACUGUGCAUCUAmGUUGmUmAmGmCUCCCm |
| | | UAGUUGUAGCUCCCUGAAACCG | | UmGmAmAmAmCmCGUUmGmCUAmCAAU*AAGmGmCCmGmUmCmGmA |
| | | UUGCUACAAUAAGGCCGUCGAA | | mAmAmGmAmUGUGCmCGCmAmAmCmGCUCUmGmCCmUmUmCmUGmG |
| | | AGAUGUGCCGCAACGCUCUGCC | | CmAmUC*mG*mU*mU |
| | | UUCUGGCAUCGUU | | |
| G021310 | 268 | AGGAAGAUAGGUCAGAAAGCAG | 468 | mA*mGGAAGAUAmGGUmCAGAAAGCAGAGmGUUGmUmAmGmCUCCCm |
| | | AGGUUGUAGCUCCCUGAAACCG | | UmGmAmAmAmCmCGUUmGmCUAmCAAU*AAGmGmCCmGmUmCmGmA |
| | | UUGCUACAAUAAGGCCGUCGAA | | mAmAmGmAmUGUGCmCGCmAmAmCmGCUCUmGmCCmUmUmCmUGmG |
| | | AGAUGUGCCGCAACGCUCUGCC | | CmAmUC*mG*mU*mU |
| | | UUCUGGCAUCGUU | | |
| G021311 | 269 | CUGGGAAAACACUACUGUGCAU | 469 | mC*mUGGGAAAAmCACmUACUGUGCAUCUmGUUGmUmAmGmCUCCCm |
| | | CUGUUGUAGCUCCCUGAAACCG | | UmGmAmAmAmCmCGUUmGmCUAmCAAU*AAGmGmCCmGmUmCmGmA |
| | | UUGCUACAAUAAGGCCGUCGAA | | mAmAmGmAmUGUGCmCGCmAmAmCmGCUCUmGmCCmUmUmCmUGmG |
| | | AGAUGUGCCGCAACGCUCUGCC | | CmAmUC*mG*mU*mU |
| | | UUCUGGCAUCGUU | | |
| G021312 | 270 | GGCCUACUUUUCAGUAUUGUGA | 470 | mG*mGCCUACUUmUUCmAGUAUUGUGAUUmGUUGmUmAmGmCUCCCm |
| | | UUGUUGUAGCUCCCUGAAACCG | | UmGmAmAmAmCmCGUUmGmCUAmCAAU*AAGmGmCCmGmUmCmGmA |
| | | UUGCUACAAUAAGGCCGUCGAA | | mAmAmGmAmUGUGCmCGCmAmAmCmGCUCUmGmCCmUmUmCmUGmG |
| | | AGAUGUGCCGCAACGCUCUGCC | | CmAmUC*mG*mU*mU |
| | | UUCUGGCAUCGUU | | |
| G021313 | 271 | UGGCCUACUUUUCAGUAUUGUG | 471 | mU*mGGCCUACUmUUUmCAGUAUUGUGAUmGUUGmUmAmGmCUCCCm |
| | | AUGUUGUAGCUCCCUGAAACCG | | UmGmAmAmAmCmCGUUmGmCUAmCAAU*AAGmGmCCmGmUmCmGmA |
| | | UUGCUACAAUAAGGCCGUCGAA | | mAmAmGmAmUGUGCmCGCmAmAmCmGCUCUmGmCCmUmUmCmUGmG |
| | | AGAUGUGCCGCAACGCUCUGCC | | CmAmUC*mG*mU*mU |
| | | UUCUGGCAUCGUU | | |
| G021314 | 272 | UUAGUCACUAAAGGUUAUAAAA | 472 | mU*mUAGUCACUmAAAmGGUUAUAAAAAAmGUUGmUmAmGmCUCCCm |
| | | AAGUUGUAGCUCCCUGAAACCG | | UmGmAmAmAmCmCGUUmGmCUAmCAAU*AAGmGmCCmGmUmCmGmA |
| | | UUGCUACAAUAAGGCCGUCGAA | | mAmAmGmAmUGUGCmCGCmAmAmCmGCUCUmGmCCmUmUmCmUGmG |
| | | AGAUGUGCCGCAACGCUCUGCC | | CmAmUC*mG*mU*mU |
| | | UUCUGGCAUCGUU | | |
| G021315 | 273 | UUUAGUCACUAAAGGUUAUAAA | 473 | mU*mUUAGUCACmUAAmAGGUUAUAAAAAmGUUGmUmAmGmCUCCCm |
| | | AAGUUGUAGCUCCCUGAAACCG | | UmGmAmAmAmCmCGUUmGmCUAmCAAU*AAGmGmCCmGmUmCmGmA |
| | | UUGCUACAAUAAGGCCGUCGAA | | mAmAmGmAmUGUGCmCGCmAmAmCmGCUCUmGmCCmUmUmCmUGmG |
| | | AGAUGUGCCGCAACGCUCUGCC | | CmAmUC*mG*mU*mU |
| | | UUCUGGCAUCGUU | | |
| G021316 | 274 | CCUGGGUUGGAAGGAGGGGGUA | 474 | mC*mCUGGGUUGmGAAmGGAGGGGGUAUAmGUUGmUmAmGmCUCCCm |
| | | UAGUUGUAGCUCCCUGAAACCG | | UmGmAmAmAmCmCGUUmGmCUAmCAAU*AAGmGmCCmGmUmCmGmA |
| | | UUGCUACAAUAAGGCCGUCGAA | | mAmAmGmAmUGUGCmCGCmAmAmCmGCUCUmGmCCmUmUmCmUGmG |
| | | AGAUGUGCCGCAACGCUCUGCC | | CmAmUC*mG*mU*mU |
| | | UUCUGGCAUCGUU | | |
| G021317 | 275 | CUGGGUUGGAAGGAGGGGGUA | 475 | mC*mUGGGUUGGmAAGmGAGGGGGUAUAAmGUUGmUmAmGmCUCCCm |
| | | UAAGUUGUAGCUCCCUGAAACC | | UmGmAmAmAmCmCGUUmGmCUAmCAAU*AAGmGmCCmGmUmCmGmA |
| | | GUUGCUACAAUAAGGCCGUCGA | | mAmAmGmAmUGUGCmCGCmAmAmCmGCUCUmGmCCmUmUmCmUGmG |
| | | AAGAUGUGCCGCAACGCUCUGC | | CmAmUC*mG*mU*mU |
| | | CUUCUGGCAUCGUU | | |
| G021318 | 276 | GGUAUAAAAGCCCCUUCACCAG | 476 | mG*mGUAUAAAAmGCCmCCUUCACCAGGAmGUUGmUmAmGmCUCCCm |
| | | GAGUUGUAGCUCCCUGAAACCG | | UmGmAmAmAmCmCGUUmGmCUAmCAAU*AAGmGmCCmGmUmCmGmA |
| | | UUGCUACAAUAAGGCCGUCGAA | | mAmAmGmAmUGUGCmCGCmAmAmCmGCUCUmGmCCmUmUmCmUGmG |
| | | | | CmAmUC*mG*mU*mU |
| | | AGAUGUGCCGCAACGCUCUGCC | | |
| | | UUCUGGCAUCGUU | | |
| G021319 | 277 | UUUGCUUGUAAAACAUUGAACG | 477 | mU*mUUGCUUGUmAAAmACAUUGAACGGUmGUUGmUmAmGmCUCCCm |
| | | GUGUUGUAGCUCCCUGAAACCG | | UmGmAmAmAmCmCGUUmGmCUAmCAAU*AAGmGmCCmGmUmCmGmA |
| | | UUGCUACAAUAAGGCCGUCGAA | | mAmAmGmAmUGUGCmCGCmAmAmCmGCUCUmGmCCmUmUmCmUGmG |
| | | AGAUGUGCCGCAACGCUCUGCC | | CmAmUC*mG*mU*mU |
| | | UUCUGGCAUCGUU | | |
| G021320 | 278 | CUUCACCAGGAGAAGCCGUCAC | 478 | mC*mUUCACCAGmGAGmAAGCCGUCACACmGUUGmUmAmGmCUCCCm |
| | | ACGUUGUAGCUCCCUGAAACCG | | UmGmAmAmAmCmCGUUmGmCUAmCAAU*AAGmGmCCmGmUmCmGmA |
| | | UUGCUACAAUAAGGCCGUCGAA | | mAmAmGmAmUGUGCmCGCmAmAmCmGCUCUmGmCCmUmUmCmUGmG |
| | | AGAUGUGCCGCAACGCUCUGCC | | CmAmUC*mG*mU*mU |
| | | UUCUGGCAUCGUU | | |
| G021321 | 279 | GAGAAGCCGUCACACAGAUCCA | 479 | mG*mAGAAGCCGmUCAmCACAGAUCCACAmGUUGmUmAmGmCUCCCm |
| | | CAGUUGUAGCUCCCUGAAACCG | | UmGmAmAmAmCmCGUUmGmCUAmCAAU*AAGmGmCCmGmUmCmGmA |
| | | UUGCUACAAUAAGGCCGUCGAA | | mAmAmGmAmUGUGCmCGCmAmAmCmGCUCUmGmCCmUmUmCmUGmG |
| | | AGAUGUGCCGCAACGCUCUGCC | | CmAmUC*mG*mU*mU |
| | | UUCUGGCAUCGUU | | |
| G021322 | 280 | UGCCCAGGGUGCUGGAGAAUCC | 480 | mU*mGCCCAGGGmUGCmUGGAGAAUCCAAmGUUGmUmAmGmCUCCCm |
| | | AAGUUGUAGCUCCCUGAAACCG | | UmGmAmAmAmCmCGUUmGmCUAmCAAU*AAGmGmCCmGmUmCmGmA |
| | | UUGCUACAAUAAGGCCGUCGAA | | mAmAmGmAmUGUGCmCGCmAmAmCmGCUCUmGmCCmUmUmCmUGmG |
| | | AGAUGUGCCGCAACGCUCUGCC | | CmAmUC*mG*mU*mU |
| | | UUCUGGCAUCGUU | | |
| G021323 | 281 | GACGUGGCUGUAAAAGUGUUCA | 481 | mG*mACGUGGCUmGUAmAAAGUGUUCAAAmGUUGmUmAmGmCUCCCm |
| | | AAGUUGUAGCUCCCUGAAACCG | | UmGmAmAmAmCmCGUUmGmCUAmCAAU*AAGmGmCCmGmUmCmGmA |
| | | UUGCUACAAUAAGGCCGUCGAA | | mAmAmGmAmUGUGCmCGCmAmAmCmGCUCUmGmCCmUmUmCmUGmG |
| | | AGAUGUGCCGCAACGCUCUGCC | | CmAmUC*mG*mU*mU |
| | | UUCUGGCAUCGUU | | |
| G021324 | 282 | CAAAAAGACCUCUGAGGGAUCC | 482 | mC*mAAAAAGACmCUCmUGAGGGAUCCUGmGUUGmUmAmGmCUCCCm |
| | | UGGUUGUAGCUCCCUGAAACCG | | UmGmAmAmAmCmCGUUmGmCUAmCAAU*AAGmGmCCmGmUmCmGmA |
| | | UUGCUACAAUAAGGCCGUCGAA | | mAmAmGmAmUGUGCmCGCmAmAmCmGCUCUmGmCCmUmUmCmUGmG |
| | | AGAUGUGCCGCAACGCUCUGCC | | CmAmUC*mG*mU*mU |
| | | UUCUGGCAUCGUU | | |
| G021325 | 283 | AAAAAGACCUCUGAGGGAUCCU | 483 | mA*mAAAAGACCmUCUmGAGGGAUCCUGGmGUUGmUmAmGmCUCCCm |
| | | GGGUUGUAGCUCCCUGAAACCG | | UmGmAmAmAmCmCGUUmGmCUAmCAAU*AAGmGmCCmGmUmCmGmA |
| | | UUGCUACAAUAAGGCCGUCGAA | | mAmAmGmAmUGUGCmCGCmAmAmCmGCUCUmGmCCmUmUmCmUGmG |
| | | AGAUGUGCCGCAACGCUCUGCC | | CmAmUC*mG*mU*mU |
| | | UUCUGGCAUCGUU | | |
| G021326 | 284 | CUCUGGACUUGUGUGCCCUCCA | 484 | mC*mUCUGGACUmUGUmGUGCCCUCCAGGmGUUGmUmAmGmCUCCCm |
| | | GGGUUGUAGCUCCCUGAAACCG | | UmGmAmAmAmCmCGUUmGmCUAmCAAU*AAGmGmCCmGmUmCmGmA |
| | | UUGCUACAAUAAGGCCGUCGAA | | mAmAmGmAmUGUGCmCGCmAmAmCmGCUCUmGmCCmUmUmCmUGmG |
| | | AGAUGUGCCGCAACGCUCUGCC | | CmAmUC*mG*mU*mU |
| | | UUCUGGCAUCGUU | | |
| G021327 | 285 | UCCUUCCAACCCAGGCUGCUGA | 485 | mU*mCCUUCCAAmCCCmAGGCUGCUGAUCmGUUGmUmAmGmCUCCCm |
| | | UCGUUGUAGCUCCCUGAAACCG | | UmGmAmAmAmCmCGUUmGmCUAmCAAU*AAGmGmCCmGmUmCmGmA |
| | | UUGCUACAAUAAGGCCGUCGAA | | mAmAmGmAmUGUGCmCGCmAmAmCmGCUCUmGmCCmUmUmCmUGmG |
| | | AGAUGUGCCGCAACGCUCUGCC | | CmAmUC*mG*mU*mU |
| | | UUCUGGCAUCGUU | | |
| G021328 | 286 | CCCCUCCUUCCAACCCAGGCUG | 486 | mC*mCCCUCCUUmCCAmACCCAGGCUGCUmGUUGmUmAmGmCUCCCmU |
| | | CUGUUGUAGCUCCCUGAAACCG | | mGmAmAmAmCmCGUUmGmCUAmCAAU*AAGmGmCCmGmUmCmGmAm |
| | | UUGCUACAAUAAGGCCGUCGAA | | AmAmGmAmUGUGCmCGCmAmAmCmGCUCUmGmCCmUmUmCmUGmGC |
| | | AGAUGUGCCGCAACGCUCUGCC | | mAmUC*mG*mU*mU |
| | | UUCUGGCAUCGUU | | |
| G021329 | 287 | AGCAACCCCCAGAAUUGAGAGA | 487 | mA*mGCAACCCCmCAGmAAUUGAGAGACUmGUUGmUmAmGmCUCCCm |
| | | CUGUUGUAGCUCCCUGAAACCG | | UmGmAmAmAmCmCGUUmGmCUAmCAAU*AAGmGmCCmGmUmCmGmA |
| | | UUGCUACAAUAAGGCCGUCGAA | | mAmAmGmAmUGUGCmCGCmAmAmCmGCUCUmGmCCmUmUmCmUGmG |
| | | AGAUGUGCCGCAACGCUCUGCC | | CmAmUC*mG*mU*mU |
| | | UUCUGGCAUCGUU | | |
| G021330 | 288 | ACCAGGAUCUUGCCAAAGCAGU | 488 | mA*mCCAGGAUCmUUGmCCAAAGCAGUAGmGUUGmUmAmGmCUCCCm |
| | | AGGUUGUAGCUCCCUGAAACCG | | UmGmAmAmAmCmCGUUmGmCUAmCAAU*AAGmGmCCmGmUmCmGmA |
| | | UUGCUACAAUAAGGCCGUCGAA | | mAmAmGmAmUGUGCmCGCmAmAmCmGCUCUmGmCCmUmUmCmUGmG |
| | | AGAUGUGCCGCAACGCUCUGCC | | CmAmUC*mG*mU*mU |
| | | UUCUGGCAUCGUU | | |
| G021331 | 289 | UUGCCAAAGCAGUAGCAUCCCA | 489 | mU*mUGCCAAAGmCAGmUAGCAUCCCAUUmGUUGmUmAmGmCUCCCm |
| | | UUGUUGUAGCUCCCUGAAACCG | | UmGmAmAmAmCmCGUUmGmCUAmCAAU*AAGmGmCCmGmUmCmGmA |
| | | UUGCUACAAUAAGGCCGUCGAA | | mAmAmGmAmUGUGCmCGCmAmAmCmGCUCUmGmCCmUmUmCmUGmG |
| | | AGAUGUGCCGCAACGCUCUGCC | | CmAmUC*mG*mU*mU |
| | | UUCUGGCAUCGUU | | |
| G021536 | 290 | CCAAGUGUCUUCCAGUACGAUU | 490 | mC*mC*mA*mAmGUGmUmCUmUCmCAGUAmCGAUmUUGmGUUGmUmA |
| | | UGGUUGUAGCUCCCUGAAACCG | | mGmCUCCCmUmGmAmAmAmCmCGUUmGmCUAmCAAU*AAGmGmCCmG |
| | | UUGCUACAAUAAGGCCGUCGAA | | mUmCmGmAmAmAmGmAmUGUGCmCGmCAAmCGCUCUmGmCCmUmUm |
| | | AGAUGUGCCGCAACGCUCUGCC | | CmUGGCAUCG*mU*mU |
| | | UUCUGGCAUCGUU | | |
| G021845 | 291 | CUUCACCAGGAGAAGCCGUCAC | 491 | mC*mU*mU*mCmACCmAmGGmAGmAAGCCmGUCAmCACmGUUGmUmA |
| | | ACGUUGUAGCUCCCUGAAACCG | | mGmCUCCCmUmGmAmAmAmCmCGUUmGmCUAmCAAU*AAGmGmCCmG |
| | | UUGCUACAAUAAGGCCGUCGAA | | mUmCmGmAmAmAmGmAmUGUGCmCGmCAAmCGCUCUmGmCCmUmUm |
| | | AGAUGUGCCGCAACGCUCUGCC | | CmUGGCAUCG*mU*mU |
| | | UUCUGGCAUCGUU | | |
| G020927 | 292 | AUCACGAUGCCUUUAUAGGGCA | 492 | mA*mU*mC*UGCCUUUAUAGGGCACCGUUUUAGAmGmCmUmAmGmAm |
| | | CCGUUUUAGAGCUAGAAAUAGC | | AmAmUmAmGmCAAGUUAAAAUAAGGCUAGUCCGUUAUCAmAmCmUmU |
| | | AAGUUAAAAUAAGGCUAGUCCG | | mGmAmAmAmAmAmGmUmGmGmCmAmCmCmGmAmGmUmCmGmGmUm |
| | | UUAUCAACUUGAAAAAGUGGCA | | GmCmU*mU*mU*mU |
| | | CCGAGUCGGUGCUUUU | | |
| G020928 | 293 | AGUGAUAUCACGAUGCCUUUAU | 493 | mA*mG*mU*CACGAUGCCUUUAUAGGUUUUAGAmGmCmUmAmGmAmA |
| | | AGGUUUUAGAGCUAGAAAUAGC | | mAmUmAmGmCAAGUUAAAAUAAGGCUAGUCCGUUAUCAmAmCmUmU |
| | | AAGUUAAAAUAAGGCUAGUCCG | | mGmAmAmAmAmAmGmUmGmGmCmAmCmCmGmAmGmUmCmGmGmUm |
| | | UUAUCAACUUGAAAAAGUGGCA | | GmCmU*mU*mU*mU |
| | | CCGAGUCGGUGCUUUU | | |
| G020929 | 294 | GGUGCAAGGAAUGAGAACCGUU | 494 | mG*mG*mU*UGCAAGGAAUGAGAACCGUUUUAGAmGmCmUmAmGmAm |
| | | UUAGAGCUAGAAAUAGCAAGUU | | AmAmUmAmGmCAAGUUAAAAUAAGGCUAGUCCGUUAUCAmAmCmUmU |
| | | AAAAUAAGGCUAGUCCGUUAUC | | mGmAmAmAmAmAmGmUmGmGmCmAmCmCmGmAmGmUmCmGmGmUm |
| | | AACUUGAAAAAGUGGCACCGAG | | GmCmU*mU*mU*mU |
| | | UCGGUGCUUUU | | |
| G029377 | 290 | CCAAGUGUCUUCCAGUACGAUU | 931 | mC*mC*mA*mAmGUGmUmCUmUCmCAGUAmCGAUmUUGmGUUGmUmA |
| | | UGGUUGUAGCUCCCUGAAACCG | | mGmCUCCCmUmGmAmAmAmCmCGUUmGmCUAmCAAUAAGmGmCCmG |
| | | UUGCUACAAUAAGGCCGUCGAA | | mUmCmGmAmAmAmGmAmUGUGCmCGmCAAmCGCUCUmGmCCmUmUm |
| | | AGAUGUGCCGCAACGCUCUGCC | | CmUGGCAUCG*mU*mU |
| | | UUCUGGCAUCGUU | | |
| G029378 | 290 | CCAAGUGUCUUCCAGUACGAUU | 932 | mC*mC*mA*mAmGUGmUmCUmUCmCAGUAmCGAUmUUGmGUUGmUmA |
| | | UGGUUGUAGCUCCCUGAAACCG | | mGmCUCCCmUmGmAmAmAmCmCGUUmGmCUAmCmAmAUAAGmGmCC |
| | | UUGCUACAAUAAGGCCGUCGAA | | mGmUmCmGmAmAmAmGmAmUGUGCmCGmCAAmCGCUCUmGmCCmUm |
| | | AGAUGUGCCGCAACGCUCUGCC | | UmCmUGGCAUCG*mU*mU |
| | | UUCUGGCAUCGUU | | |
| G029379 | 290 | CCAAGUGUCUUCCAGUACGAUU | 933 | mC*mC*mA*mAmGUGmUmCUmUCmCAGUAmCGAUmUUGmGUUGmUmA |
| | | UGGUUGUAGCUCCCUGAAACCG | | mGmCUCCCmUmGmAmAmAmCmCGUUmGmCUAmCAmAUAAGmGmCCm |
| | | UUGCUACAAUAAGGCCGUCGAA | | GmUmCmGmAmAmAmGmAmUGUGCmCGmCAAmCGCUCUmGmCCmUmU |
| | | AGAUGUGCCGCAACGCUCUGCC | | mCmUGGCAUCG*mU*mU |
| | | UUCUGGCAUCGUU | | |
| G029380 | 290 | CCAAGUGUCUUCCAGUACGAUU | 934 | mC*mC*mA*mAmGUGmUmCUmUCmCAGUAmCGAUmUUGmGUUGmUmA |
| | | UGGUUGUAGCUCCCUGAAACCG | | mGmCUCCCmUmGmAmAmAmCmCGUUmGmCUAmCmAmAU*AAGmGmCC |
| | | UUGCUACAAUAAGGCCGUCGAA | | mGmUmCmGmAmAmAmGmAmUGUGCmCGmCAAmCGCUCUmGmCCmUm |
| | | AGAUGUGCCGCAACGCUCUGCC | | UmCmUGGCAUCG*mU*mU |
| | | UUCUGGCAUCGUU | | |
| G029381 | 290 | CCAAGUGUCUUCCAGUACGAUU | 935 | mC*mC*mA*mAmGUGmUmCUmUCmCAGUAmCGAUmUUGmGUUGmUmA |
| | | UGGUUGUAGCUCCCUGAAACCG | | mGmCUCCCmUmGmAmAmAmCmCGUUmGmCUAmCAAdTAAGmGmCCmG |
| | | UUGCUACAAUAAGGCCGUCGAA | | mUmCmGmAmAmAmGmAmUGUGCmCGmCAAmCGCUCUmGmCCmUmUm |
| | | AGAUGUGCCGCAACGCUCUGCC | | CmUGGCAUCG*mU*mU |
| | | UUCUGGCAUCGUU | | |
| G029382 | 290 | CCAAGUGUCUUCCAGUACGAUU | 936 | mC*mC*mA*mAmGUGmUmCUmUCmCAGUAmCGAUmUUGmGUUGmUmA |
| | | UGGUUGUAGCUCCCUGAAACCG | | mGmCUCCCmUmGmAmAmAmCmCGUUmGmCUAmCAAU*AAGmGmCCmG |
| | | UUGCUACAAUAAGGCCGUCGAA | | mUmCmGmAmAmAmGmAmUGUGCmCGmCAAmCmGCUCUmGmCCmUmU |
| | | AGAUGUGCCGCAACGCUCUGCC | | mCmUGGCAUCG*mU*mU |
| | | UUCUGGCAUCGUU | | |
| G029383 | 290 | CCAAGUGUCUUCCAGUACGAUU | 937 | mC*mC*mA*mAmGUGmUmCUmUCmCAGUAmCGAUmUUGmGUUGmUmA |
| | | UGGUUGUAGCUCCCUGAAACCG | | mGmCUCCCmUmGmAmAmAmCmCGUUmGmCUAmCAAU*AAGmGmCCmG |
| | | UUGCUACAAUAAGGCCGUCGAA | | mUmCmGmAmAmAmGmAmUGUGCmCGmCAAmCGCUCmUmGmCCmUmU |
| | | AGAUGUGCCGCAACGCUCUGCC | | mCmUGGCAUCG*mU*mU |
| | | UUCUGGCAUCGUU | | |
| G029384 | 290 | CCAAGUGUCUUCCAGUACGAUU | 938 | mC*mC*mA*mAmGUGmUmCUmUCmCAGUAmCGAUmUUGmGUUGmUmA |
| | | UGGUUGUAGCUCCCUGAAACCG | | mGmCUCCCmUmGmAmAmAmCmCGUUmGmCUAmCAAU*AAGmGmCCmG |
| | | UUGCUACAAUAAGGCCGUCGAA | | mUmCmGmAmAmAmGmAmUGUGCmCGmCAAmCGmCmUmCmUmGmCCm |
| | | AGAUGUGCCGCAACGCUCUGCC | | UmUmCmUGGCAUCG*mU*mU |
| | | UUCUGGCAUCGUU | | |
| G029385 | 290 | CCAAGUGUCUUCCAGUACGAUU | 939 | mC*mC*mA*mAmGUGmUmCUmUCmCAGUAmCGAUmUUGmGUUGmUmA |
| | | UGGUUGUAGCUCCCUGAAACCG | | mGmCUCCCmUmGmAmAmAmCmCGUUmGmCUAmCAAU*AAGmGmCCmG |
| | | UUGCUACAAUAAGGCCGUCGAA | | mUmCmGmAmAmAmGmAmUGUGCmCGmCAAmCGmCmUmCUmGmCCmU |
| | | AGAUGUGCCGCAACGCUCUGCC | | mUmCmUGGCAUCG*mU*mU |
| | | UUCUGGCAUCGUU | | |
| G029386 | 290 | CCAAGUGUCUUCCAGUACGAUU | 940 | mC*mC*mA*mAmGUGmUmCUmUCmCAGUAmCGAUmUUGmGUUGmUmA |
| | | UGGUUGUAGCUCCCUGAAACCG | | mGmCUCCCmUmGmAmAmAmCmCGUUmGmCUAmCAAU*AAGmGmCCmG |
| | | UUGCUACAAUAAGGCCGUCGAA | | mUmCmGmAmAmAmGmAmUGUGCmCGmCAAmCmGmCmUmCmUmGmCC |
| | | AGAUGUGCCGCAACGCUCUGCC | | mUmUmCmUGGCAUCG*mU*mU |
| | | UUCUGGCAUCGUU | | |
| G029387 | 290 | CCAAGUGUCUUCCAGUACGAUU | 941 | mC*mC*mA*mAmGUGmUmCUmUCmCAGUAmCGAUmUUGmGUUGmUmA |
| | | UGGUUGUAGCUCCCUGAAACCG | | mGmCUCCCmUmGmAmAmAmCmCGUUmGmCUAmCAAU*AAGmGmCCmG |
| | | UUGCUACAAUAAGGCCGUCGAA | | mUmCmGmAmAmAmGmAmUGUGCmCGmCmAmAmCmGmCmUmCmUmGm |
| | | AGAUGUGCCGCAACGCUCUGCC | | CmCmUmUmCmUGGCAUCG*mU*mU |
| | | UUCUGGCAUCGUU | | |
| G029388 | 290 | CCAAGUGUCUUCCAGUACGAUU | 942 | mC*mC*mA*mAmGUGmUmCUmUCmCAGUAmCGAUmUUGmGUUGmUmA |
| | | UGGUUGUAGCUCCCUGAAACCG | | mGmCUCCCmUmGmAmAmAmCmCGUUmGmCUAmCAAU*AAGmGmCCmG |
| | | UUGCUACAAUAAGGCCGUCGAA | | mUmCmGmAmAmAmGmAmUGUGCmCGmCAAmCGCUCUmGmCCmUmUm |
| | | AGAUGUGCCGCAACGCUCUGCC | | CmUGGCAUmCmG*mU*mU |
| | | UUCUGGCAUCGUU | | |
| G029389 | 290 | CCAAGUGUCUUCCAGUACGAUU | 943 | mC*mC*mA*mAmGUGmUmCUmUCmCAGUAmCGAUmUUGmGUUGmUmA |
| | | UGGUUGUAGCUCCCUGAAACCG | | mGmCUCCCmUmGmAmAmAmCmCGUUmGmCUAmCAAU*AAGmGmCCmG |
| | | UUGCUACAAUAAGGCCGUCGAA | | mUmCmGmAmAmAmGmAmUGUGCmCGmCAAmCGCUCUmGmCCmUmUm |
| | | AGAUGUGCCGCAACGCUCUGCC | | CmUGGCmAmUmCmG*mU*mU |
| | | UUCUGGCAUCGUU | | |
| G029390 | 290 | CCAAGUGUCUUCCAGUACGAUU | 944 | mC*mC*mA*mAmGUGmUmCUmUCmCAGUAmCGAUmUUGmGUUGmUmA |
| | | UGGUUGUAGCUCCCUGAAACCG | | mGmCUCCCmUmGmAmAmAmCmCGUUmGmCUAmCAAU*AAGmGmCCmG |
| | | UUGCUACAAUAAGGCCGUCGAA | | mUmCmGmAmAmAmGmAmUGUGCmCGmCmAmAmCmGmCmUmCmUmGm |
| | | AGAUGUGCCGCAACGCUCUGCC | | CmCmUmUmCmUGGCmAmUmCmG*mU*mU |
| | | UUCUGGCAUCGUU | | |
| G029391 | 290 | CCAAGUGUCUUCCAGUACGAUU | 945 | mC*mC*mA*mAmGUGmUmCUmUCmCAGUAmCGAUmUUGmGUUGmUmA |
| | | UGGUUGUAGCUCCCUGAAACCG | | mGmCUCCCmUmGmAmAmAmCmCGUUmGmCUAmCAAU*AAGmGmCCmG |
| | | UUGCUACAAUAAGGCCGUCGAA | | mUmCmGmAmAmAmGmAmUGUGCmCGmCmAmAmCmGmCmUmCmUmGm |
| | | AGAUGUGCCGCAACGCUCUGCC | | CmCmUmUmCmUGGCAUmCmG*mU*mU |
| | | UUCUGGCAUCGUU | | |
| G029392 | 290 | CCAAGUGUCUUCCAGUACGAUU | 946 | mC*mC*mA*mAmGUGmUmCUmUCmCAGUAmCGAUmUUGmGUUGmUmA |
| | | UGGUUGUAGCUCCCUGAAACCG | | mGmCUCCCmUmGmAmAmAmCmCGUUmGmCUAmCAAU*AAGmGmCCmG |
| | | UUGCUACAAUAAGGCCGUCGAA | | mUmCmGmAmAmAmGmAmUGUGCmCGmCAAmCmGmCmUmCmUmGmCC |
| | | AGAUGUGCCGCAACGCUCUGCC | | mUmUmCmUGGCAUmCmG*mU*mU |
| | | UUCUGGCAUCGUU | | |
| G032572 | 290 | CCAAGUGUCUUCCAGUACGAUU | 951 | mC*mC*mA*mAmGUGmUmCUmUCmCAGUAmCGAUmUUGmGUUGmUmA |
| | | UGGUUGUAGCUCCCUGAAACCG | | mGmCUCCCmUmGmAmAmAmCmCGUUmGmCUAmCAAUAAGmGmCCmG |
| | | UUGCUACAAUAAGGCCGUCGAA | | mUmCmGmAmAmAmGmAmUGUGCmCGmCAAmCGmCmUmCmUmGmCCm |
| | | AGAUGUGCCGCAACGCUCUGCC | | UmUmCmUGGCAUCG*mU*mU |
| | | UUCUGGCAUCGUU | | |
| G031771 | 295 | CCAAGUGUCUUCCAGUACGAUU | 952 | mC*mC*mA*mAmGUGmUmCUmUCmCAGUAmCGAUmUUGmGUUGmUmA |
| | | UGGUUGUAGCUCCCUUCGAAAG | | mGmCUCCCmUmUmCmGmAmAmAmGmAmCmCGUUmGmCUAmCAAUAA |
| | | ACCGUUGCUACAAUAAGGCCGU | | GmGmCCmGmUmCmGmAmAmAmGmAmUGUGCmCGmCAAmCGmCmUmC |
| | | CGAAAGAUGUGCCGCAACGCUC | | mUmGmCCmUmUmCmUGGCAUCG*mU*mU |
| | | UGCCUUCUGGCAUCGUU | | |

[0328] N represents a nucleotide having any base, e.g., A, C, G, or U. (mN*)₃ represents three consecutive nucleotides each having any base, a 2′-OMe, and a 3′ PS linkage to the next nucleotide, respectively. (N)₂₀₋₂₅ represent 20-25, i.e., 20, 21, 22, 23, 24, or 25 consecutive N. A, C, G, and U represent nucleotides having adenine, cytosine, guanine, and uracil bases, respectively.

[0329] Nucleotide modifications are indicated in Tables 1-2 as follows: m: 2′-OMe; *: PS linkage; f: 2′-fluoro; (invd): inverted abasic; moe: 2′-moe; e: ENA; d: deoxyribonucleotide (also note that T is always a deoxyribonucleotide); x: UNA. In the sgRNA modified sequences, in certain embodiments, each A, C, G, U, and N is independently a ribose sugar (2′-OH). In certain embodiments, each A, C, G, U, and N is a ribose sugar (2′-OH). Thus, for example, mA represents 2′-O-methyl adenosine; xA represents a UNA nucleotide with an adenine nucleobase; eA represents an ENA nucleotide with an adenine nucleobase; and dA represents an adenosine deoxyribonucleotide.

[0330] sgRNA designations are sometimes provided with one or more leading zeroes immediately following the G. This does not affect the meaning of the designation. Thus, for example, G000282, G0282, G00282, and G282 refer to the same sgRNA.

TABLE 3
exemplary NmeCas9 sgRNA (SEQ ID NO: 500)

| 1-24 | 25 | 26 | 27 | 28 | 29 | 30 | 31 |
|---|---|---|---|---|---|---|---|
| NNNNNNNNNNNNNNNNNNNNNNNN | G | U | U | G | U | A | G |

| | | | | | | Lower stem | | | | | | | | | | | |
|---|---|---|---|---|---|---|---|---|---|---|---|---|---|---|---|---|---|
| Guide region | | | | | | Repeat/Anti-Repeat region | | | | | | | | | | | |
| | 32 | 33 | 34 | 35 | 36 | 37 | 38 | 39 | 40 | 41 | 42 | 43 | 44 | 45 | 46 | 47 | 48 |
| | C | U | C | C | C | U | U | U | C | U | C | A | U | U | U | C | G |

| | |
|---|---|
| Lower stem | Upper stem |

Repeat/Anti-Repeat region

| 49 | 50 | 51 | 52 | 53 | 54 | 55 | 56 | 57 | 58 | 59 | 60 | 61 | 62 | 63 | 64 | 65 | 66 | 67 | 68 | 69 | 70 | 71 | 72 | 73 | 74 | 75 | 76 | 77 |
|---|---|---|---|---|---|---|---|---|---|---|---|---|---|---|---|---|---|---|---|---|---|---|---|---|---|---|---|---|
| G | A | A | A | C | G | A | A | A | U | G | A | G | A | A | C | C | G | U | U | G | C | U | A | C | A | A | U | A |

| | | |
|---|---|---|
| Loop | Upper stem | Lower Stem |

Repeat/Anti-Repeat region

| 78 | 79 | 80 | 81 | 82 | 83 | 84 | 85 | 86 | 87 | 88 | 89 | 90 | 91 | 92 | 93 | 94 |
|---|---|---|---|---|---|---|---|---|---|---|---|---|---|---|---|---|
| A | G | G | C | C | G | U | C | U | G | A | A | A | A | G | A | U |

| | | |
|---|---|---|
| Stem | Loop | Stem (96: unpaired) |

Hairpin 1

| 95 | 96 | 97 | 98 | 99 | 100 | 101 | 102 | 103 | 104 | 105 | 106 | 107 | 108 |
|---|---|---|---|---|---|---|---|---|---|---|---|---|---|
| G | U | G | C | C | G | C | A | A | C | G | C | U | C |

| | | |
|---|---|---|
| Stem (96: unpaired) | Lower stem | Bulge |

| | |
|---|---|
| Hairpin 1 | Hairpin 2 |

| 109 | 110 | 111 | 112 | 113 | 114 | 115 | 116 | 117 | 118 | 119 | 120 | 121 |
|---|---|---|---|---|---|---|---|---|---|---|---|---|
| U | G | C | C | C | C | U | U | A | A | A | G | C |

Upper Stem
Hairpin 2

| 122 | 123 | 124 | 125 | 126 | 127 | 128 | 129 | 130 | 131 | 132 | 133 | 134 |
|---|---|---|---|---|---|---|---|---|---|---|---|---|
| U | U | C | U | G | C | U | U | U | A | A | G | G |

| | |
|---|---|
| Loop | Upper Stem |

| | | | Hairpin 2 | | | | | | | |
|---|---|---|---|---|---|---|---|---|---|---|
| 135 | 136 | 137 | 138 | 139 | 140 | 141 | 142 | 143 | 144 | 145 |
| G | G | C | A | U | C | G | U | U | U | A |

| | | |
|---|---|---|
| Upper Stem | Bulge | Lower Stem |

| | |
|---|---|
| Hairpin 2 | Tail |

### Definitions

[0331] The articles “a” and “an” are used herein to refer to one or to more than one (i.e., to at least one) of the grammatical object of the article. By way of example, “an element” means one element or more than one element, e.g., a plurality of elements.

[0332] The term “including” is used herein to mean, and is used interchangeably with, the phrase “including but not limited to,” such that recitation of items in a list is not to the exclusion of other like items that can be substituted or added to the listed items.

[0333] The term “or” is used herein to mean, and is used interchangeably with, the term “and/or,” unless context clearly indicates otherwise. For example, “sense strand or antisense strand” is understood as “sense strand or antisense strand or sense strand and antisense strand.”

[0334] The term “about” is used herein to mean within the typical ranges of tolerances in the art. For example, “about” can be understood as about 2 standard deviations from the mean. In certain embodiments, about means +10%. In certain embodiments, about means +5%, +2%, or +1%. When about is present before a series of numbers or a range, it is understood that “about” can modify each of the numbers in the series or range. At the very least, and not as an attempt to limit the application of the doctrine of equivalents to the scope of the claims, each numerical parameter should at least be construed in light of the number of reported significant digits and by applying ordinary rounding techniques.

[0335] The term “at least” prior to a number or series of numbers is understood to include the number adjacent to the term “at least”, and all subsequent numbers or integers that could logically be included, as clear from context. For example, the number of nucleotides in a nucleic acid molecule must be an integer. For example, “at least 17 nucleotides of a 20 nucleotide nucleic acid molecule” means that 17, 18, 19, or 20 nucleotides have the indicated property. When at least is present before a series of numbers or a range, it is understood that “at least” can modify each of the numbers in the series or range.

[0336] As used herein, “no more than” or “less than” is understood as the value adjacent to the phrase and logical lower values or integers, as logical from context, to zero. For example, a duplex region of “no more than 2 nucleotide base pairs” has 2, 1, or 0 nucleotide base pairs. When “no more than” or “less than” is present before a series of numbers or a range, it is understood that each of the numbers in the series or range is modified.

[0337] As used herein, ranges include both the upper and lower limits.

[0338] As used herein, it is understood that when the maximum amount of a value is represented by 100% (e.g., 100% inhibition) that the value is interpreted in light of the method of detection. For example, 100% inhibition is understood as inhibition to a level below the level of detection of the assay.

[0339] “Editing efficiency” or “editing percentage” or “percent editing” as used herein is the total number of sequence reads with insertions, deletions, or base changes of nucleotides into the target region of interest over the total number of sequence reads following cleavage or nicking by a Cas RNP.

[0340] “Regions” as used herein describes portions of nucleic acids. Regions may also be referred to as “modules” or “domains.” Regions of an sgRNA may perform particular functions, e.g., in directing endonuclease activity of the RNP, for example as described in Briner A E et al., Molecular Cell 56:333-339 (2014), or have predicted structures. Exemplary regions of an sgRNA are described in Table 3.

[0341] “Hairpin” or “hairpin structure” as used herein describes a duplex of nucleic acids that is created when a nucleic acid strand folds and forms base pairs with another section of the same strand. A hairpin may form a structure that comprises a loop or a U-shape. In some embodiments, a hairpin may be comprised of an RNA loop. Hairpins can be formed with two complementary sequences in a single nucleic acid molecule bind together, with a folding or wrinkling of the molecule. In some embodiments, hairpins comprise stem or stem loop structures. In some embodiments, a hairpin comprises a loop and a stem. As used herein, when two hairpins are present in a gRNA, a “hairpin region” can refer to hairpin 1 and hairpin 2 and the intervening sequence (e.g., “n”) between hairpin 1 and hairpin 2 of a conserved region of an sgRNA.

[0342] As used herein, “form a duplex portion” is understood as being capable of forming an uninterrupted duplex portion or predicted to form an uninterrupted duplex portion, e.g., by base pairing. A duplex portion may comprise two complementary sequences, e.g., a first hairpin stem region and a second hairpin stem region complementary to the first. As used herein, a duplex portion has a length of at least 2 base pairs. A duplex portion optionally comprises 2-10 base pairs, and the two strands that form the duplex portion may be joined, for example, by a nucleotide loop. Base pairing in a duplex can include Watson-Crick base pairing, optionally in combination with base stacking. As used herein, a duplex portion can include a single nucleotide discontinuity on one strand wherein each contiguous nucleotide on one strand is based paired with a nucleotide on the complementary strand which may have a discontinuity of one non-base paired nucleotide, e.g., as in nucleotide 96 of SEQ ID NO: 500 in hairpin 1, wherein the discontinuity is flanked immediately 5′ and 3′ with Watson-Crick base pairs. This is distinct from non-paired nucleotides 36 and 65 in the repeat-anti-repeat region, and non-paired nucleotides 106-108 and 139 in hairpin 2, which constitute a discontinuity resulting in two duplex portions, as defined herein. RNA structures are well known in the art and tools are available for structural prediction of RNAs (see, e.g., Sato et al., Nature Comm. 12:941 (2021); RNAstructure at ma.urmc.rochester.edu/RNAstructureWeb/Servers/Predict1/Predicti.html and RNAfold WebServer at ma.tbi.univie.ac.at/cgi-bin/RNAWebSuite/RNAfold.cgi). Bridging lengths and structural flexibility required to permit a fold and form a loop to allow nucleobases to come into sufficiently close proximity to base pair are well known in the art.

[0343] As used herein, an “RNA-guided DNA binding agent” means a polypeptide or complex of polypeptides having RNA and DNA binding activity, or a DNA-binding subunit of such a complex, wherein the DNA binding activity is sequence-specific and depends on the sequence of the RNA. Exemplary RNA-guided DNA binding agents include Cas cleavases (which have double strand cleaving activity), Cas nickases (which have single strand cleaving activity), and inactivated forms thereof (“dCas DNA binding agents”). “Cas nuclease”, as used herein, encompasses Cas cleavases, Cas nickases, and dCas DNA binding agents. The dCas DNA binding agent may be a dead nuclease comprising non-functional nuclease domains (RuvC or HNH domain). In some embodiments the Cas cleavase or Cas nickase encompasses a dCas DNA binding agent modified to permit DNA cleavage, e.g., via fusion with a FokI domain. In some embodiments, the RNA-guided DNA binding agent has nuclease activity, e.g., cleavase or nickase activity.

[0344] Exemplary nucleotide and polypeptide sequences of Cas9 molecules are provided below. Methods for identifying alternate nucleotide sequences encoding Cas9 polypeptide sequences, including alternate naturally occurring variants, are known in the art. Sequences with at least 75%, 80%, 85%, 90%, 95%, 96%, 97%, 98%, or 99% identity to any of the Cas9 nucleic acid sequences, amino acid sequences, or nucleic acid sequences encoding the amino acid sequences provided herein are also contemplated. Exemplary open reading frames for Cas9 are provided in Table 4A.

[0345] As used herein, “ribonucleoprotein” (RNP) or “RNP complex” refers to a guide RNA together with an RNA-guided DNA binding agent, such as a Cas nuclease, e.g., a Cas cleavase, Cas nickase, or dCas DNA binding agent (e.g., Cas9). In some embodiments, the guide RNA guides the RNA-guided DNA binding agent such as Cas9 to a target sequence, and the guide RNA hybridizes with and the agent binds to the target sequence; in cases where the agent is a cleavase or nickase, binding can be followed by cleaving or nicking.

[0346] “Stem loop” as used herein describes a secondary structure of nucleotides that form a base-paired “stem” that ends in a loop of unpaired nucleic acids. A stem may be formed when two regions of the same nucleic acid strand are at least partially complementary in sequence when read in opposite directions. “Loop” as used herein describes a region of nucleotides that do not base pair (i.e., are not complementary) that may cap a stem. A “tetraloop” describes a loop of 4 nucleotides. As used herein, the upper stem of an sgRNA may comprise a tetraloop.

[0347] “Guide RNA”, “gRNA”, and “guide” are used herein interchangeably to refer to, the combination of a crRNA (also known as CRISPR RNA) and a trRNA (also known as tracrRNA). The crRNA and trRNA may be associated as a single RNA molecule (single guide RNA, sgRNA) or in two separate RNA molecules (dual guide RNA, dgRNA). “Guide RNA” or “gRNA” refers to each type. The trRNA may be a naturally occurring sequence, or a trRNA sequence with modifications or variations compared to naturally-occurring sequences. Guide RNAs can include modified RNAs as described herein. In some embodiments, a guide RNA as used herein does not include a non-nucleotide linker to join two nucleotides within the guide RNA. Unless otherwise clear from the context, guide RNAs described herein are suitable for use with an Nine Cas9, e.g., an Nme1, Nme2, or Nme3 Cas9. For example, FIG. 24 shows an exemplary schematic of Nme2 sgRNA in a possible secondary structure.

[0348] As used herein, a nucleotide that is, for example, 6 nucleotides from the 5′ end of a particular sgRNA segment is the sixth nucleotide of that segment, or “nucleotide 6” from the 5′ end, e.g., XXXXXN, where N is the 6^{th} nucleotide from the 5′ end. A range of nucleotides that is located “at or after” 6 nucleotides from the 5′ end begins with the 6^{th} nucleotide and continues down the chain toward the 3′ end. Similarly, a nucleotide that is, for example, 5 nucleotides from the 3′ end of the chain is the 5^{th} nucleotide when counting from the 3′ end of the chain, e.g., NXXXX. A numeric position or range in the guide region refers to the position as determined from the 5′ end unless another point of reference is specified; for example, “nucleotide 5” in a guide region is the 5′ nucleotide from the 5′ end.

[0349] The term a “conserved region” refers to a conserved region of an N. meningitidis Cas9 (“NmeCas9”) gRNA as shown in Table 3. The first row shows the numbering of the nucleotides; the second row shows an exemplary sequence (e.g., SEQ ID NO: 500); and the third and fourth rows show the regions. Shortened conserved regions lack at least one nucleotide shown in Table 3, as discussed in detail below.

[0350] As used herein, a “shortened” region in a gRNA is a conserved region of a gRNA that lacks at least 1 nucleotide compared to the corresponding conserved region shown in Table 3. Similarly, “shortened” with respect to an sgRNA means that its conserved region comprises fewer nucleotides than the sgRNA conserved region shown in Table 3. Under no circumstances does “shortened” imply any particular limitation on a process or manner of production of the gRNA.

[0351] “Substituted” or “substitution” as used herein with respect to a polynucleotide refers to an alteration of a nucleobase that changes its preferred base for Watson-Crick pairing or disrupts a base stacking interaction. When a certain region of a guide RNA is “unsubstituted” as used herein, the sequence of the region can be aligned to that of the corresponding conserved region of a NmeCas9 sgRNA (e.g., SEQ ID NO: 500) or any other gRNAs (e.g., part of SEQ ID NO: 1-19, 21-42, 301-494, and 931-946) with gaps and matches only (i.e., no mismatches), where bases are considered to match if they have the same preferred standard partner base (A, C, G, or T/U) for Watson-Crick pairing or have the paired base stacking interactions as shown in FIG. 25.

[0352] As used herein, a “conservative substitution” with respect to a polynucleotide refers to an alteration of a nucleobase means exchanging positions of base paired nucleotides such that base pairings may be maintained. For example, a G-C pair becomes a C-G pair, an A-U pair for a U-A pair, or other natural or modified base pairing.

[0353] As used herein, “substituted” and the like, in regard to unpaired nucleotides (e.g., loops of the repeat/anti-repeat, hairpin 1, or hairpin 2 regions, i.e., nucleotides 49-52, 87-90, and 122-125 in SEQ ID NO: 500, respectively, or other unpaired nucleotides) refers to the replacement of one or more nucleotides, e.g., 1, 2, 3, or 4 nucleotides, of the nucleotide sequence with a different nucleotide that does not interfere with the formation of a structure by the unpaired nucleotides (e.g., a bulge or a loop) which may thus permit formation of one or more duplex portions, e.g., in the repeat/anti-repeat, hairpin 1, or hairpin 2 regions.

[0354] In some embodiments, a gRNA comprises nucleotides that “match the modification pattern” at corresponding or specified nucleotides of a gRNA described herein. This means that the nucleotides matching the modification pattern have the same modifications (e.g., phosphorothioate, 2′-fluoro, 2′-OMe, etc.) as the nucleotides at the corresponding positions of the gRNA described herein, regardless of whether the nucleobases at those positions match. For example, if in a first gRNA, nucleotides 5 and 6, respectively, have 2′-OMe and phosphorothioate modifications, then this gRNA has the same modification pattern at nucleotides 5 and 6 as a second gRNA that also has 2′-OMe and phosphorothioate modifications at nucleotides 5 and 6, respectively, regardless of whether the nucleobases at positions 5 and 6 are the same or different in the first and second gRNAs. However, a 2′-OMe modification at nucleotide 6 but not nucleotide 7 is not the same modification pattern at nucleotides 6 and 7 as a 2′-OMe modification at nucleotide 7 but not nucleotide 6. Similarly, a modification pattern that matches at least 75% of the modification pattern of a gRNA described herein means that at least 75% of the nucleotides have the same modifications as the corresponding positions of the gRNA described herein. Corresponding positions may be determined by pairwise or structural alignment.

[0355] As used herein, a “guide sequence” or “guide region” and the like refer to a sequence within a guide RNA that is complementary to a target sequence and functions to direct a guide RNA to a target sequence for binding or modification (e.g., cleavage) by NmeCas9A “guide sequence” may also be referred to as a “targeting sequence,” or a “spacer sequence.” A guide sequence can be 20-25 nucleotides in length, e.g., in the case of Nine Cas9, e.g., 20-, 21-, 22-, 23-, 24- or 25-nucleotides in length.

[0356] Target sequences for RNA-guided DNA binding agents include both the positive and negative strands of genomic DNA (i.e., the sequence given and the reverse complement of the sequence), as a nucleic acid substrate for an RNA-guided DNA binding agent is a double stranded nucleic acid. Accordingly, where a guide sequence is said to be “complementary to a target sequence”, it is to be understood that the guide sequence may direct a guide RNA to bind to the sense or antisense strand (e.g. reverse complement) of a target sequence. Thus, in some embodiments, where the guide sequence binds the reverse complement of a target sequence, the guide sequence is identical to certain nucleotides of the target sequence (e.g., the target sequence not including the PAM) except for the substitution of U for T in the guide sequence.

[0357] As used herein, the “5′ end” refers to the first nucleotide of the gRNA, including a dgRNA (typically the 5′ end of the crRNA of the dgRNA) and sgRNA, i.e., the 5′ end of the guide sequence, in which the 5′ position is not linked to another nucleotide.

[0358] As used herein, a “5′ end modification” refers to a gRNA comprising a guide region having modifications in one or more of the one (1) to about seven (7) nucleotides, optionally to about four (4) nucleotides at its 5′ end, optionally wherein the first nucleotide (from the 5′ end) of the gRNA is modified.

[0359] As used herein, the “3′ end” refers to the end or terminal nucleotide of a gRNA, in which the 3′ position is not linked to another nucleotide. In some embodiments, the 3′ end is in the 3′ tail. In some embodiments, the 3′ end is in the conserved region of a gRNA.

[0360] As used herein, a “3′ end modification” refers to a gRNA having modifications in one or more of the one (1) to about seven (7) nucleotides, optionally about four (4) nucleotides, at its 3′ end, optionally wherein the last nucleotide (i.e., the 3′ most nucleotide) of the gRNA is modified. If a 3′ tail is present, the 1 to about 7 nucleotides, optionally about four (4) nucleotides, may be within the 3′ tail. If a 3′ tail is not present, the 1 to about 7 nucleotides, optionally about four (4) nucleotides, may be within the conserved region of a sgRNA.

[0361] The “last,” “second to last,” “third to last,” etc., nucleotide refers to the 3′ most, second 3′ most, third 3′ most, etc., nucleotide, respectively in a given sequence. For example, in the sequence 5′-AAACTG-3′, the last, second to last, and third to last nucleotides are G, T, and C, respectively. The phrase “last 3 nucleotides” refers to the last, second to last, and third to last nucleotides; more generally, “last N nucleotides” refers to the last to the Nth to last nucleotides, inclusive. “Third nucleotide from the 3′ end of the 3′ terminus” is equivalent to “third to last nucleotide.” Similarly, “third nucleotide from the 5′ end of the 5′ terminus” is equivalent to “third nucleotide at the 5′ terminus.”

[0362] As used herein, a “protective end modification” (such as a protective 5′ end modification or protective 3′ end modification) refers to a modification of one or more nucleotides within seven nucleotides, optionally four nucleotides, of the end of an sgRNA that reduces degradation of the sgRNA, such as exonucleolytic degradation. In some embodiments, a protective end modification comprises modifications of at least two or at least three nucleotides within seven nucleotides, optionally four nucleotides, of the end of the sgRNA. In some embodiments, the modifications comprise phosphorothioate linkages, 2′ modifications such as 2′-OMe or 2′-fluoro, 2′-H (DNA), ENA, UNA, or a combination thereof. In some embodiments, the modifications comprise phosphorothioate linkages and 2′-OMe modifications. In some embodiments, at least three terminal nucleotides are modified, e.g., with phosphorothioate linkages or with a combination of phosphorothioate linkages and 2′-OMe modifications. In some embodiments, at least two terminal nucleotides are modified, e.g., with phosphorothioate linkages or with a combination of phosphorothioate linkages and 2′-OMe modifications. Modifications known to those of skill in the art to reduce exonucleolytic degradation are encompassed.

[0363] In some embodiments, a “3′ tail” comprising about 1-10 nucleotides, optionally about 1-4 nucleotides, following the conserved region of a sgRNA at its 3′ end.

[0364] Several Cas9 orthologs have been obtained from N. meningitidis (Esvelt et al., NAT. METHODS, vol. 10, 2013, 1116-1121; Hou et al., PNAS, vol. 110, 2013, pages 15644-15649) (Nme1Cas9, Nme2Cas9, and Nme3Cas9). The Nme2Cas9 ortholog functions efficiently in mammalian cells, recognizes an N4CC PAM, and can be used for in vivo editing (Ran et al., NATURE, vol. 520, 2015, pages 186-191; Kim et al., NAT. COMMUN., vol. 8, 2017, pages 14500). Nme2Cas9 has been shown to be naturally resistant to off-target editing (Lee et al., MOL. THER., vol. 24, 2016, pages 645-654; Kim et al., 2017). See also e.g., WO/2020081568 (e.g., pages 28 and 42), describing an Nme2Cas9 D16A nickase, the contents of which are hereby incorporated by reference in its entirety. Further, NmeCas9 variants are known in the art, see, e.g., Huang et al., Nature Biotech. 2022, doi.org/10.1038/s41587-022-01410-2, which describes Cas9 variants targeting single-nucleotide-pyrimidine PAMs.

[0365] As used herein, “NmeCas9” (sometimes referred to as “Cas9”) encompasses NmeCas9, e.g., Nme1Cas9, Nme2Cas9, and Nme3Cas9; the variants of NmeCas9 listed herein, and equivalents thereof. See, e.g., Edraki et al., Mol. Cell 73:714-726, 2019. “Cas nuclease”, also called “Cas protein”, as used herein, encompasses Cas cleavases, Cas nickases which further have RNA-guided DNA cleavases or nickase activity, and dCas DNA binding agents, in which cleavase/nickase activity is inactivated. In some embodiments, NmeCas9 has double strand cleavage activity. In some embodiments, NmeCas9 has nickase activity. In some embodiments, NmeCas9 comprises a dCas DNA binding domain.

[0366] As used herein, a first sequence is considered to “comprise a sequence with at least X % identity to” a second sequence if an alignment of the first sequence to the second sequence shows that X % or more of the positions of the second sequence in its entirety are matched by the first sequence. For example, the sequence AAGA comprises a sequence with 100% identity to the sequence AAG because an alignment would give 100% identity in that there are matches to all three positions of the second sequence. The differences between RNA and DNA (generally the exchange of uridine for thymidine or vice versa) and the presence of nucleoside analogs such as modified uridines do not contribute to differences in identity or complementarity among polynucleotides as long as the relevant nucleotides (such as thymidine, uridine, or modified uridine) have the same complement (e.g., adenosine for all of thymidine, uridine, or modified uridine; another example is cytosine and 5-methylcytosine, both of which have guanosine or modified guanosine as a complement). Thus, for example, the sequence 5′-AXG where X is any modified uridine, such as pseudouridine, N1-methyl pseudouridine, or 5-methoxyuridine, is considered 100% identical to AUG in that both are perfectly complementary to the same sequence (5′-CAU). Exemplary alignment algorithms are the Smith-Waterman and Needleman-Wunsch algorithms, which are well-known in the art. One skilled in the art will understand what choice of algorithm and parameter settings are appropriate for a given pair of sequences to be aligned; for sequences of generally similar length and expected identity >50% for amino acids or >75% for nucleotides, the Needleman-Wunsch algorithm with default settings of the Needleman-Wunsch algorithm interface provided by the EBI at the www.ebi.ac.uk web server is generally appropriate.

[0367] “mRNA” is used herein to refer to a polynucleotide that is RNA or modified RNA and comprises an open reading frame that can be translated into a polypeptide (i.e., can serve as a substrate for translation by a ribosome and amino-acylated tRNAs). mRNA can comprise a phosphate-sugar backbone including ribose residues or analogs thereof, e.g., 2′-methoxy ribose residues. In some embodiments, the sugars of a nucleic acid phosphate-sugar backbone consist essentially of ribose residues, 2′-methoxy ribose residues, or a combination thereof. In general, mRNAs do not contain a substantial quantity of thymidine residues (e.g., 0 residues or fewer than 30, 20, 10, 5, 4, 3, or 2 thymidine residues; or less than 10%, 9%, 8%, 7%, 6%, 5%, 4%, 4%, 3%, 2%, 1%, 0.5%, 0.2%, or 0.1% thymidine content). An mRNA can contain modified uridines at some or all of its uridine positions. A modified mRNA comprises at least one nucleotide in which one or more of the phosphate, sugar, or nucleobase differ from that of a standard adenosine, cytidine, guanidine, or uridine nucleotide.

[0368] As used herein, a “subject” refers to any member of the animal kingdom. In some embodiments, “subject” refers to humans. In some embodiments, “subject” refers to non-human animals. In some embodiments, “subject” refers to primates. In some embodiment, “subject” refers to non-human primates. In some embodiments, subjects include, but are not limited to, mammals, birds, reptiles, amphibians, fish, insects, or worms. In certain embodiments, the non-human subject is a mammal (e.g., a rodent, a mouse, a rat, a rabbit, a monkey, a dog, a cat, a sheep, cattle, a primate, or a pig). In some embodiments, a subject may be a transgenic animal, genetically-engineered animal, or a clone. In certain embodiments of the present invention the subject is an adult, an adolescent or an infant. In some embodiments, terms “individual” or “patient” are used and are intended to be interchangeable with “subject” wherein the subject is a human subject.

[0369] As used herein, “treatment” refers to any administration or application of a therapeutic for disease or disorder in a subject, and includes slowing or arresting disease development or progression, relieving one or more signs or symptoms of the disease, curing the disease, or preventing reoccurrence of one or more symptoms of the disease.

[0370] As used herein, “delivering” and “administering” are used interchangeably, and include ex vivo and in vivo applications.

[0371] Co-administration, as used herein, means that a plurality of substances are administered sufficiently close together in time so that the agents act together. Co-administration encompasses administering substances together in a single formulation and administering substances in separate formulations close enough in time so that the agents act together.

[0372] As used herein, the phrase “pharmaceutically acceptable” means that which is useful in preparing a pharmaceutical composition that is generally non-toxic and is not biologically undesirable and that are not otherwise unacceptable for pharmaceutical use. Pharmaceutically acceptable generally refers to substances that are non-pyrogenic. Pharmaceutically acceptable can refer to substances that are sterile, especially for pharmaceutical substances that are for injection or infusion.

I. Guide RNAs with One or More Shortened Conserved Regions

[0373] Provided herein are guide RNAs (gRNAs) comprising one or more shortened conserved regions.

[0374] In some embodiments, a gRNA provided herein comprises a guide region and a conserved region comprising a repeat/anti-repeat region, a hairpin 1 region, and a hairpin 2 region, wherein one or more of the repeat/anti-repeat region, the hairpin 1 region, and the hairpin 2 region are shortened. In some embodiments, the gRNA is from N. meningitidis Cas9 (NmeCas9).

[0375] In some embodiments, the conserved region comprises one or more of:
[0376] (a) a shortened repeat/anti-repeat region, wherein the shortened repeat/anti-repeat region lacks 2-24 nucleotides, wherein
   [0377] (i) one or more of nucleotides 37-48 and 53-64 is deleted and optionally one or more of nucleotides 37-64 is substituted relative to SEQ ID NO: 500; and
   [0378] (ii) nucleotide 36 is linked to nucleotide 65 by at least 2 nucleotides; or
[0379] (b) a shortened hairpin 1 region, wherein the shortened hairpin 1 lacks 2-10, optionally 2-8 nucleotides, wherein
   [0380] (i) one or more of nucleotides 82-86 and 91-95 is deleted and optionally one or more of positions 82-96 is substituted relative to SEQ ID NO: 500; and
   [0381] (ii) nucleotide 81 is linked to nucleotide 96 by at least 4 nucleotides; or
[0382] (c) a shortened hairpin 2 region, wherein the shortened hairpin 2 lacks 2-18, optionally 2-16 nucleotides, wherein
   [0383] (i) one or more of nucleotides 113-121 and 126-134 is deleted and optionally one or more of nucleotides 113-134 is substituted relative to SEQ ID NO: 500; and
   [0384] (ii) nucleotide 112 is linked to nucleotide 135 by at least 4 nucleotides;
[0385] wherein one or both nucleotides 144-145 are optionally deleted relative to SEQ ID NO: 500; and
[0386] wherein at least 10 nucleotides are modified nucleotides.

[0387] In some embodiments, the conserved region comprises:
[0388] a shortened repeat/anti-repeat region, wherein the shortened repeat/anti-repeat region lacks 2-24 nucleotides, wherein
[0389] (i) one or more of nucleotides 37-48 and 53-64 is deleted and optionally one or more of nucleotides 37-64 is substituted relative to SEQ ID NO: 500; and
[0390] (ii) nucleotide 36 is linked to nucleotide 65 by at least 2 nucleotides;
[0391] wherein one or both nucleotides 144-145 are optionally deleted relative to SEQ ID NO: 500;
[0392] wherein at least 10 nucleotides in the conserved region are modified nucleotides.

[0393] In some embodiments, the conserved region comprises:
[0394] a shortened hairpin 1 region, wherein the shortened hairpin 1 lacks 2-10, optionally 2-8 nucleotides, wherein
[0395] (i) one or more of nucleotides 82-86 and 91-95 is deleted and optionally one or more of positions 82-96 is substituted relative to SEQ ID NO: 500; and
[0396] (ii) nucleotide 81 is linked to nucleotide 96 by at least 4 nucleotides;
[0397] wherein one or both nucleotides 144-145 are optionally deleted relative to SEQ ID NO: 500;
[0398] wherein at least 10 nucleotides in the conserved region are modified nucleotides.

[0399] In some embodiments, the conserved region comprises:
[0400] a shortened hairpin 2 region, wherein the shortened hairpin 2 lacks 2-18, optionally 2-16 nucleotides, wherein
[0401] (i) one or more of nucleotides 113-121 and 126-134 is deleted and optionally one or more of nucleotides 113-134 is substituted relative to SEQ ID NO: 500; and
[0402] (ii) nucleotide 112 is linked to nucleotide 135 by at least 4 nucleotides;
[0403] wherein one or both nucleotides 144-145 are optionally deleted relative to SEQ ID NO: 500;
[0404] wherein at least 10 nucleotides in the conserved region are modified nucleotides.

[0405] In some embodiments, the conserved region comprises:
[0406] (a) a shortened repeat/anti-repeat region, wherein the shortened repeat/anti-repeat region lacks 2-24 nucleotides, wherein
   [0407] (i) one or more of nucleotides 37-48 and 53-64 is deleted and optionally one or more of nucleotides 37-64 is substituted relative to SEQ ID NO: 500; and
   [0408] (ii) nucleotide 36 is linked to nucleotide 65 by at least 2 nucleotides; and
[0409] (b) a shortened hairpin 1 region, wherein the shortened hairpin 1 lacks 2-10, optionally 2-8 nucleotides, wherein
   [0410] (i) one or more of nucleotides 82-86 and 91-95 is deleted and optionally one or more of positions 82-96 is substituted relative to SEQ ID NO: 500; and
   [0411] (ii) nucleotide 81 is linked to nucleotide 96 by at least 4 nucleotides; or
[0412] wherein one or both nucleotides 144-145 are optionally deleted relative to SEQ ID NO: 500;
[0413] wherein at least 10 nucleotides in the conserved region are modified nucleotides.

[0414] In some embodiments, the conserved region comprises:
[0415] (a) a shortened repeat/anti-repeat region, wherein the shortened repeat/anti-repeat region lacks 2-24 nucleotides, wherein
   [0416] (i) one or more of nucleotides 37-48 and 53-64 is deleted and optionally one or more of nucleotides 37-64 is substituted relative to SEQ ID NO: 500; and
   [0417] (ii) nucleotide 36 is linked to nucleotide 65 by at least 2 nucleotides; and
[0418] (b) a shortened hairpin 2 region, wherein the shortened hairpin 2 lacks 2-18, optionally 2-16 nucleotides, wherein
   [0419] (i) one or more of nucleotides 113-121 and 126-134 is deleted and optionally one or more of nucleotides 113-134 is substituted relative to SEQ ID NO: 500; and
   [0420] (ii) nucleotide 112 is linked to nucleotide 135 by at least 4 nucleotides;
[0421] wherein one or both nucleotides 144-145 are optionally deleted relative to SEQ ID NO: 500;
[0422] wherein at least 10 nucleotides in the conserved region are modified nucleotides.

[0423] In some embodiments, the conserved region comprises:
[0424] (a) a shortened hairpin 1 region, wherein the shortened hairpin 1 lacks 2-10, optionally 2-8 nucleotides, wherein
   [0425] (i) one or more of nucleotides 82-86 and 91-95 is deleted and optionally one or more of positions 82-96 is substituted relative to SEQ ID NO: 500; and
   [0426] (ii) nucleotide 81 is linked to nucleotide 96 by at least 4 nucleotides; and
[0427] (b) a shortened hairpin 2 region, wherein the shortened hairpin 2 lacks 2-18, optionally 2-16 nucleotides, wherein
   [0428] (i) one or more of nucleotides 113-121 and 126-134 is deleted and optionally one or more of nucleotides 113-134 is substituted relative to SEQ ID NO: 500; and
   [0429] (ii) nucleotide 112 is linked to nucleotide 135 by at least 4 nucleotides;
[0430] wherein one or both nucleotides 144-145 are optionally deleted relative to SEQ ID NO: 500;
[0431] wherein at least 10 nucleotides in the conserved region are modified nucleotides.

[0432] In some embodiments, the conserved region comprises:
[0433] (a) a shortened repeat/anti-repeat region, wherein the shortened repeat/anti-repeat region lacks 2-24 nucleotides, wherein
   [0434] (i) one or more of nucleotides 37-48 and 53-64 is deleted and optionally one or more of nucleotides 37-64 is substituted relative to SEQ ID NO: 500; and
   [0435] (ii) nucleotide 36 is linked to nucleotide 65 by at least 2 nucleotides;
[0436] (b) a shortened hairpin 1 region, wherein the shortened hairpin 1 lacks 2-10, optionally 2-8 nucleotides, wherein
   [0437] (i) one or more of nucleotides 82-86 and 91-95 is deleted and optionally one or more of positions 82-96 is substituted relative to SEQ ID NO: 500; and
   [0438] (ii) nucleotide 81 is linked to nucleotide 96 by at least 4 nucleotides; and
[0439] (c) a shortened hairpin 2 region, wherein the shortened hairpin 2 lacks 2-18, optionally 2-16 nucleotides, wherein
   [0440] (i) one or more of nucleotides 113-121 and 126-134 is deleted and optionally one or more of nucleotides 113-134 is substituted relative to SEQ ID NO: 500; and
   [0441] (ii) nucleotide 112 is linked to nucleotide 135 by at least 4 nucleotides;
[0442] wherein one or both nucleotides 144-145 are optionally deleted relative to SEQ ID NO: 500;
[0443] wherein at least 10 nucleotides of the conserved region are modified nucleotides.

[0444] In some embodiment, the gRNA disclosed herein is a sgRNA.

[0445] In some embodiments, one or both nucleotides 144-145 are deleted relative to SEQ ID NO: 500.

[0446] In some embodiments, at least 10 nucleotides of the conserved region are modified nucleotides.

[0447] In some embodiments, a repeat/anti-repeat region of a gRNA is a shortened repeat/anti-repeat region lacking 2-24 nucleotides, e.g., any of the repeat/anti-repeat regions indicated in the numbered embodiments above or Tables 1-2 or described elsewhere herein, which may be combined with any of the shortened hairpin 1 region or hairpin 2 region described herein, including but not limited to combinations indicated in the numbered embodiments above and represented in the sequences of Tables 1-2 or described elsewhere herein. In some embodiments, one or more of positions 49-52, 87-90, or 122-125 is substituted relative to SEQ ID NO: 500. In some embodiments, all of positions 49-52, 87-90, or 122-125 are substituted relative to SEQ ID NO: 500. In some embodiments, the 3′ tail provided in Tables 1-2 or described herein is deleted.

[0448] In some embodiments, the shortened repeat/anti-repeat region of the gRNA lacks 18 nucleotides. In some embodiments, the shortened repeat/anti-repeat region of the gRNA lacks 22 nucleotides.

[0449] In some embodiments, in the shortened repeat/anti-repeat region of the gRNA, nucleotide 36 is linked to nucleotide 65 by 6 nucleotides. In some embodiments, in the shortened repeat/anti-repeat region of the gRNA, nucleotide 36 is linked to nucleotide 65 by 7 nucleotides. In some embodiments, in the shortened repeat/anti-repeat region of the gRNA, nucleotide 36 is linked to nucleotide 65 by 8 nucleotides. In some embodiments, in the shortened repeat/anti-repeat region of the gRNA, nucleotide 36 is linked to nucleotide 65 by 9 nucleotides. In some embodiments, in the shortened repeat/anti-repeat region of the gRNA, nucleotide 36 is linked to nucleotide 65 by 10 nucleotides.

[0450] In some embodiments, in the shortened repeat/anti-repeat region of the gRNA, nucleotides 38-48 and 53-63 are deleted relative to SEQ ID NO: 500. In some embodiments, in the shortened repeat/anti-repeat region of the gRNA, nucleotides 38, 41-48, 53-60, and 63 are deleted relative to SEQ ID NO: 500.

[0451] In some embodiments, in the shortened repeat/anti-repeat region of the gRNA, nucleotide 36 is linked to nucleotide 65 by 6 nucleotides. In some embodiments, in the shortened repeat/anti-repeat region of the gRNA, nucleotides 38-48 and 53-63 are deleted relative to SEQ ID NO: 500, and nucleotide 36 is linked to nucleotide 65 by nucleotides 37, 49-52, and 64.

[0452] In some embodiments, in the shortened repeat/anti-repeat region of the gRNA, nucleotide 36 is linked to nucleotide 65 by 10 nucleotides. In some embodiments, in the shortened repeat/anti-repeat region of the gRNA, nucleotides 38, 41-48, 53-60, and 63 are deleted relative to SEQ ID NO: 500, and nucleotide 36 is linked to nucleotide 65 by nucleotides 37, 39, 40, 49-52, 61, 62, and 64.

[0453] In some embodiments, all of nucleotides 38-48 and nucleotides 53-63 of the upper stem of the shortened repeat/anti-repeat region are deleted relative to SEQ ID NO: 500.

[0454] In some embodiments, all of nucleotides 39-48 and nucleotides 53-62 of the upper stem of the shortened repeat/anti-repeat region are deleted relative to SEQ ID NO: 500, and nucleotides 38 and 63 is substituted.

[0455] In some embodiments, the shortened repeat/anti-repeat region has 14 modified nucleotides. In some embodiments, the shortened repeat/anti-repeat region has 15 modified nucleotides. In some embodiments, the shortened repeat/anti-repeat region has 16 modified nucleotides. In some embodiments, the shortened repeat/anti-repeat region has 17 modified nucleotides. In some embodiments, the shortened repeat/anti-repeat region has 18 modified nucleotides. In some embodiments, the shortened repeat/anti-repeat region has 19 modified nucleotides. In some embodiments, the shortened repeat/anti-repeat region has 20 modified nucleotides.

[0456] In some embodiments, the shortened hairpin 1 region lacks 2 nucleotides. In some embodiments, the shortened hairpin 1 region lacks 21 nucleotides. In some embodiments, the shortened hairpin 1 region lacks 2 nucleotides, and nucleotides 86 and 91 are deleted relative to SEQ ID NO: 500. In some embodiments, the shortened hairpin 1 region lacks 2 nucleotides, and nucleotides 85 and 92 are deleted relative to SEQ ID NO: 500. In some embodiments, in the shortened hairpin 1 region, nucleotide 81 is linked to nucleotide 96 by 12 nucleotides. In some embodiments, in the shortened hairpin 1 region, nucleotide 81 is linked to nucleotide 96 by 12 nucleotides. In some embodiments, in the shortened hairpin 1 region, nucleotides 86 and 91 are deleted relative to SEQ ID NO: 500, and nucleotide 81 is linked to nucleotide 96 by nucleotides 82-85, 87-90, and 92-95. In some embodiments, in the shortened hairpin 1 region, nucleotides 85 and 92 are deleted relative to SEQ ID NO: 500, and nucleotide 81 is linked to nucleotide 96 by nucleotides 82-84, 86-91, and 93-95.

[0457] In some embodiments, the shortened hairpin 1 region has a duplex portion of 7 base paired nucleotides in length. In some embodiments, the shortened hairpin 1 region has a duplex portion of 8 base paired nucleotides in length.

[0458] In the stem of the shortened hairpin 1 region is seven base paired nucleotides in length. In some embodiments, nucleotides 85-86 and nucleotides 91-92 of the shortened hairpin 1 region are deleted.

[0459] In some embodiments, the shortened hairpin 1 region has 13 modified nucleotides.

[0460] In some embodiments, the shortened hairpin 2 lacks 18 nucleotides. In some embodiments, the shortened hairpin 2 has 24 nucleotides. In some embodiments, in the shortened hairpin 2 nucleotides 113-121 and 126-134 are deleted relative to SEQ ID NO: 500. In some embodiments, the shortened hairpin 2 lacks 18 nucleotides, and nucleotides 113-121 and 126-134 are deleted relative to SEQ ID NO: 500. In some embodiments, in the shortened hairpin 2 region, nucleotide 112 is linked to nucleotide 135 by 4 nucleotides. In some embodiments, in the shortened hairpin 2 region, nucleotides 113-121 and 126-134 are deleted relative to SEQ ID NO: 500 and nucleotide 112 is linked to nucleotide 135 by nucleotides 122-125.

[0461] In some embodiments, the shortened repeat/anti-repeat region has a length of 28 nucleotides. In some embodiments, the shortened repeat/anti-repeat region has a length of 32 nucleotides.

[0462] In some embodiments, the upper stem of the shortened repeat/anti-repeat region comprises no more than one base pair. In some embodiments, the upper stem of the shortened repeat/anti-repeat region comprises no more than three base pairs.

[0463] In some embodiments, the shortened hairpin 2 region has 8 modified nucleotides.

[0464] In some embodiments, a guide RNA (gRNA) comprises a guide region and a conserved region, the conserved region comprising:
[0465] (a) a shortened repeat/anti-repeat region, wherein the shortened repeat/anti-repeat region lacks 18-22 nucleotides relative to SEQ ID NO: 500, wherein
   [0466] (i) nucleotides 38-48 and 53-63 are deleted; and
   [0467] (ii) nucleotide 36 is linked to nucleotide 65 by 6-10 nucleotides;
[0468] (b) a shortened hairpin 1 region, wherein the shortened hairpin 1 lacks 2 nucleotides, wherein nucleotides 86 and 91 are deleted or nucleotides 85 and 92 are deleted relative to SEQ ID NO: 500; and
[0469] (c) a shortened hairpin 2 region, wherein the shortened hairpin 2 lacks 18 nucleotides, wherein nucleotides 113-121 and 126-134 are deleted relative to SEQ ID NO: 500; and wherein nucleotides 144-145 are deleted relative to SEQ ID NO: 500; wherein at least 10 nucleotides are modified nucleotides.

[0470] In some embodiments, a guide RNA (gRNA) comprises a guide region and a conserved region, the conserved region comprising:
[0471] (a) a shortened repeat/anti-repeat region, wherein the shortened repeat/anti-repeat region lacks 18-22 nucleotides relative to SEQ ID NO: 500, wherein
   [0472] (i) nucleotides 38, 41-48, 53-60, and 63 are deleted; and
   [0473] (ii) nucleotide 36 is linked to nucleotide 65 by 6-10 nucleotides;
[0474] (b) a shortened hairpin 1 region, wherein the shortened hairpin 1 lacks 2 nucleotides, wherein nucleotides 86 and 91 are deleted or nucleotides 85 and 92 are deleted relative to SEQ ID NO: 500;
[0475] (c) a shortened hairpin 2 region, wherein the shortened hairpin 2 lacks 18 nucleotides, wherein nucleotides 113-121 and 126-134 are deleted relative to SEQ ID NO: 500; and
[0476] wherein nucleotides 144-145 are deleted relative to SEQ ID NO: 500;
[0477] wherein at least 10 nucleotides are modified nucleotides.

[0478] In some embodiments, a guide RNA (gRNA) is provided, the gRNA comprising a guide region and a conserved region, the conserved region comprising one or more of:
[0479] (a) a shortened repeat/anti-repeat region, wherein the shortened repeat/anti-repeat region lacks 18-22 nucleotides relative to SEQ ID NO: 500, wherein
   [0480] (i) nucleotides 37-48 and 53-64 are deleted; and
   [0481] (ii) nucleotide 36 is linked to nucleotide 65 by 6-10 nucleotides; or
[0482] (b) a shortened hairpin 1 region, wherein the shortened hairpin 1 lacks 2 nucleotides, wherein nucleotides 86 and 91 are deleted or nucleotides 85 and 92 are deleted relative to SEQ ID NO: 500; or
[0483] (c) a shortened hairpin 2 region, wherein the shortened hairpin 2 lacks 18 nucleotides, wherein nucleotides 113-121 and 126-134 are deleted relative to SEQ ID NO: 500; and
[0484] wherein nucleotides 144-145 are deleted relative to SEQ ID NO: 500;
[0485] wherein at least 10 nucleotides are modified nucleotides.

[0486] In further embodiments, the shortened repeat/anti-repeat region, wherein the shortened repeat/anti-repeat region lacks 22 nucleotides relative to SEQ ID NO: 500. In further embodiments, nucleotide 36 is linked to nucleotide 65 by a sequence comprising the nucleotide sequence UGAAAC. In further embodiments, the nucleotide 36 is linked to nucleotide 65 by 10 nucleotides. In further embodiments, the nucleotide 36 is linked to nucleotide 65 by a sequence comprising the nucleotide sequence UUCGAAAGAC (SEQ ID NO: 950).

[0487] In some embodiments, the guide RNA (gRNA) of the previous embodiment comprising a guide region and a conserved region, the conserved region comprising:
[0488] (a) a shortened repeat/anti-repeat region, wherein the shortened repeat/anti-repeat region lacks 18-22 nucleotides, wherein
   [0489] (i) nucleotides 37-48 and 53-64 are deleted relative to SEQ ID NO: 500; and
   [0490] (ii) nucleotide 36 is linked to nucleotide 65 by 6-10 nucleotides;
[0491] (b) a shortened hairpin 1 region, wherein the shortened hairpin 1 lacks 2 nucleotides relative to SEQ ID NO: 500, wherein nucleotides 86 and 91 are deleted or nucleotides 85 and 92 are deleted;
[0492] (c) a shortened hairpin 2 region, wherein the shortened hairpin 2 lacks 18 nucleotides, wherein nucleotides 113-121 and 126-134 are deleted relative to SEQ ID NO: 500; and
[0493] (d) wherein nucleotides 144-145 are deleted relative to SEQ ID NO: 500;
[0494] wherein at least 10 nucleotides are modified nucleotides.

[0495] In further embodiments, the shortened repeat/anti-repeat region, wherein the shortened repeat/anti-repeat region lacks 22 nucleotides relative to SEQ ID NO: 500. In further embodiments, nucleotide 36 is linked to nucleotide 65 by a sequence comprising the nucleotide sequence UGAAAC. In further embodiments, the nucleotide 36 is linked to nucleotide 65 by 10 nucleotides. In further embodiments, the nucleotide 36 is linked to nucleotide 65 by a sequence comprising the nucleotide sequence UUCGAAAGAC (SEQ ID NO: 950).

### A. Shortened Repeat/Anti-Repeat Region

[0496] In some embodiments, a gRNA described herein comprises a conserved region comprising a shortened repeat/anti-repeat region. In some embodiments, the repeat-anti-repeat region comprises a hairpin structure between a first portion and a second portion of the repeat-anti-repeat region, wherein the first portion and the second portion of the repeat-anti-repeat region together form a duplex portion.

[0497] In some embodiments, a gRNA described herein comprises a conserved region comprising a shortened upper stem region of the repeat/anti-repeat region. In some embodiments, the repeat/anti-repeat region comprises a loop (e.g., a tetraloop).

[0498] In some embodiments, the shortened repeat/anti-repeat region lacks 2-24 nucleotides. In some embodiments, (i) one or more of nucleotides 37-48 and 53-64 is deleted and optionally one or more of nucleotides 37-64 is substituted relative to SEQ ID NO: 500; and (ii) nucleotide 36 is linked to nucleotide 65 by at least 4 nucleotides.

[0499] In some embodiments, the shortened repeat/anti-repeat region lacks 2-24 nucleotides.

[0500] In some embodiments, the shortened repeat/anti-repeat region has a length of 28, 29, 30, 31, 32, 33, 34, 35, 36, 37, 38, 39, 40, 41, 42, 43, 44, 45, 46, 47, 48, 49, or 50 nucleotides.

[0501] In some embodiments, the shortened repeat/anti-repeat region lacks 12-24 nucleotides, optionally 18-24 nucleotides. In some embodiments, the shortened repeat/anti-repeat region has a length of 28, 29, 30, 31, 32, 33, 34, 35, 36, 37, 38, 39, or 40 nucleotides. In some embodiments, the shortened repeat/anti-repeat region has a length of 28, 29, 30, 31, 32, 33, or 34 nucleotides. In some embodiments, the shortened repeat/anti-repeat region has a length of 28 nucleotides. In some embodiments, the shortened repeat/anti-repeat region has a length of 29 nucleotides. In some embodiments, the shortened repeat/anti-repeat region has a length of 30 nucleotides. In some embodiments, the shortened repeat/anti-repeat region has a length of 31 nucleotides. In some embodiments, the shortened repeat/anti-repeat region has a length of 32 nucleotides. In some embodiments, the shortened repeat/anti-repeat region has a length of 33 nucleotides. In some embodiments, the shortened repeat/anti-repeat region has a length of 34 nucleotides.

[0502] In some embodiments, nucleotides 37-64 of SEQ ID NO: 500 form the upper stem, and one or more base pairs of the upper stem of the shortened repeat/anti-repeat region are deleted. In some embodiments, the upper stem of the shortened repeat/anti-repeat region comprises no more than one, two, three, or four base pairs. In some embodiments, all of positions 38-48 and all of positions 53-63 of the upper stem of the shortened repeat/anti-repeat region are deleted. In some embodiments, all of nucleotides 37-48 and 53-64 of the upper stem of the shortened repeat/anti-repeat region are deleted. As used herein, “base pairs” or “base paired nucleotides” or “Watson-Crick pairing nucleotides” include any pair capable of forming a Watson-Crick base pair, including A-T, A-U, T-A, U-A, C-G, and G-C pairs, and pairs including modified versions of any of the foregoing nucleotides that have the same base pairing preference. As used herein, base pairs or base paired nucleotides also include base pairs generated by base stacking, e.g. nucleotides 25 and 76, 33 and 68, 34 and 67, and 37 and 64 in the repeat/anti-repeat region; and nucleotides 78 and 100, and 83 and 94 in the hairpin 1 region.

[0503] In some embodiments, one or more of positions 37-48 is deleted. In some embodiments, position 37 is deleted. In some embodiments, position 38 is deleted. In some embodiments, position 39 is deleted. In some embodiments, position 40 is deleted. In some embodiments, position 41 is deleted. In some embodiments, position 42 is deleted. In some embodiments, position 43 is deleted. In some embodiments, position 44 is deleted. In some embodiments, position 45 is deleted. In some embodiments, position 46 is deleted. In some embodiments, position 47 is deleted. In some embodiments, position 48 is deleted.

[0504] In some embodiments, one or more of positions 53-63 is deleted. In some embodiments, position 53 is deleted. In some embodiments, position 54 is deleted. In some embodiments, position 55 is deleted. In some embodiments, position 56 is deleted. In some embodiments, position 57 is deleted. In some embodiments, position 58 is deleted. In some embodiments, position 59 is deleted. In some embodiments, position 60 is deleted. In some embodiments, position 61 is deleted. In some embodiments, position 62 is deleted. In some embodiments, position 63 is deleted. In some embodiments, position 64 is deleted.

[0505] In some embodiments, the shortened repeat/anti-repeat region has a duplex portion 11 base paired nucleotides in length. In some embodiments, the shortened repeat/anti-repeat region has a single duplex portion.

[0506] In some embodiments, one or more of base paired nucleotides in the repeat/anti-repeat region is deleted. In some embodiments, one or more of based paired nucleotides chosen from positions 37 and 53, positions 38 and 54, position 39 and 55, positions 40 and 56, positions 41 and 57, positions 43 and 58, positions 43 and 59, positions 44 and 60, positions 45 and 61, positions 46 and 62, positions 47 and 63, and positions 48 and 64.

[0507] In some embodiments, the upper stem region of the repeat/anti-repeat region comprises 1-5 base pairs.

[0508] In some embodiments, the upper stem of the shortened repeat/anti-repeat region includes one or more substitution relative to SEQ ID NO: 500.

[0509] In some embodiments, one or more substitutions are conservative substitutions that maintain base pairing(s). For example, a G-C pair becomes a C-G pair or other natural or modified base pairing, or an A-U pair becomes a U-A pair or other natural or modified base pairing. In some embodiments, one or more substitutions are conservative substitutions that exchange positions of base paired nucleotides (e.g., a G-C pair becomes a C-G pair, or an A-U pair for becomes a U-A pair).

[0510] In some embodiments, one or more of nucleotides 49-52 is substituted relative to SEQ ID NO: 500. In some embodiments, the shortened repeat/anti-repeat region is unsubstituted.

[0511] In some embodiments, the shortened repeat/anti-repeat region has 12-22 modified nucleotides.

### B. Shortened Hairpin 1 Region

[0512] In some embodiments, a gRNA described herein comprises a conserved region comprising a shortened hairpin 1 region. In some embodiments, the hairpin 1 region comprises a hairpin structure between a first portion and a second portion of the hairpin 1 region, wherein the first portion and the second portion together form a duplex portion.

[0513] In some embodiments, a gRNA described herein comprises a conserved region comprising a shortened upper stem region of the hairpin 1 region. In some embodiments, the hairpin 1 comprises a loop (e.g., a tetraloop).

[0514] In some embodiments, the shortened hairpin 1 lacks 2-10 nucleotides. In some embodiments, the shortened hairpin 1 lacks 2-8 nucleotides. In some embodiments, the shortened hairpin 1 lacks 2-4 nucleotides. In some embodiments, the shortened hairpin lacks 2 nucleotides. In some embodiments, the shortened hairpin lacks 3 nucleotides. In some embodiments, the shortened hairpin lacks 4 nucleotides. In some embodiments, the shortened hairpin lacks 5 nucleotides. In some embodiments, the shortened hairpin lacks 6 nucleotides. In some embodiments, the shortened hairpin lacks 7 nucleotides. In some embodiments, the shortened hairpin lacks 8 nucleotides. In some embodiments, the shortened hairpin lacks 9 nucleotides. In some embodiments, the shortened hairpin lacks 10 nucleotides. In some embodiments, (i) one or more of nucleotides 82-86 and 91-95 is deleted and optionally one or more of positions 82-95 is substituted relative to SEQ ID NO: 500; and (ii) nucleotide 81 is linked to nucleotide 96 by at least 4 nucleotides.

[0515] In some embodiments, wherein the shortened hairpin 1 region lacks 2-10 nucleotides. In some embodiments, wherein the shortened hairpin 1 region has a length of 13, 14, 15, 16, 17, 18, 19, 20 or 21 nucleotides. In some embodiments, wherein the shortened hairpin 1 region has duplex portion 7-8 base paired nucleotides in length. As used herein, nucleotide 96 is not considered to interrupt the duplex portion of hairpin 1 when one or more of base pairs 82 and 95, 83 and 94, 85 and 93, and 86 and 92 are present.

[0516] In some embodiments, the shortened hairpin 1 region has a single duplex portion. In some embodiments, in the shortened hairpin 1 region, positions 78 and 100, and positions 83 and 94 have base stacking interactions and do not constitute a discontinuity in the duplex portion.

[0517] In some embodiments, one or two base pairs of the shortened hairpin 1 region are deleted. In some embodiments, the stem of the shortened hairpin 1 region comprises one, two, three, four, five, six, seven, or eight base pairs. In some embodiments, the stem of the shortened hairpin 1 region is seven or eight base paired nucleotides in length.

[0518] In some embodiments, one or more of positions 85-86 and one or more of nucleotides 91-92 of the shortened hairpin 1 region are deleted. In some embodiments, nucleotides 86 and 91 of the shortened hairpin 1 region are deleted. In some embodiments, nucleotides 85 and 92 of the shortened hairpin 1 region are deleted. In some embodiments, one or more of nucleotides 82-95 of the shortened hairpin 1 region is substituted relative to SEQ ID NO: 500. In some embodiments, one or more of nucleotides 87-91 is substituted relative to SEQ ID NO: 500.

[0519] In some embodiments, the shortened hairpin 1 region is unsubstituted. In some embodiments, wherein the shortened hairpin 1 region has 6-15 modified nucleotides.

### C. Shortened Hairpin 2 Region

[0520] In some embodiments, a gRNA described herein comprises a conserved region comprising a shortened hairpin 2 region. In some embodiments, the hairpin 2 region comprises a hairpin structure between a first portion and a second portion of the hairpin 2 region, wherein the first portion and the second portion together form a duplex portion.

[0521] In some embodiments, (c) a shortened hairpin 2 region, wherein the shortened hairpin 2 lacks 2-16 nucleotides. In some embodiments, (i) one or more of nucleotides 113-121 and 126-134 is deleted and optionally one or more of nucleotides 113-134 is substituted relative to SEQ ID NO: 500; and (ii) nucleotide 112 is linked to nucleotide 135 by at least 4 nucleotides.

[0522] In some embodiments, a conserved region of a gRNA described herein comprises a shortened upper stem region of the hairpin 2 region. In some embodiments, the hairpin 1 comprises a loop (e.g., a tetraloop). In some embodiments, the shortened hairpin 2 region lacks 2-16 nucleotides. In some embodiments, the shortened hairpin 2 region has a length of 26, 27, 28, 29, 30, 31, 32, 33, 34, 35, 36, 37, 38, 39, or 40 nucleotides. In some embodiments, the shortened hairpin 2 region has a length of 28, 29, 30, 31, 32, 33 or 34, nucleotides. In some embodiments, one or more of positions 113-121 and one or more of nucleotides 126-134 of the shortened hairpin 2 region are deleted.

[0523] The shortened hairpin 2 region comprises an unpaired region The unpaired region, nucleotides 106-108 and nucleotide 139 on the opposite strand, result in a discontinuity of the duplex portion within hairpin 2, providing two duplex portions, nucleotides 102-105 and 140-143, and nucleotides 109-112 and 135-138.

[0524] In some embodiments, the shortened hairpin 2 region has two duplex portions. In some embodiments, the shortened hairpin 2 region has one duplex portion of 4 base paired nucleotides in length. In some embodiments, the shortened hairpin 2 region has one duplex portion of 4-8 base paired nucleotides in length. In some embodiments, the shortened hairpin 2 region has one duplex portion of 4-6 base paired nucleotides in length. In some embodiments, the upper stem of the shortened hairpin 2 region comprises one, two, three, or four base pairs. In some embodiments, at least one pair of nucleotides 113 and 134, nucleotides 114 and 133, nucleotides 115 and 132, nucleotides 116 and 131, nucleotides 117 and 130, nucleotides 118 and 129, nucleotides 119 and 128, nucleotides 120 and 127, and nucleotides 121 and 126 are deleted. In some embodiments, all of positions 113-121 and 126-134 of the shortened hairpin 2 region are deleted.

[0525] In some embodiments wherein one or more of nucleotides 113-134 of the shortened hairpin 2 region is substituted relative to SEQ ID NO: 500. In some embodiments one or more of nucleotides 122-125 is substituted relative to SEQ ID NO: 500.

[0526] In some embodiments the shortened hairpin 2 region is unsubstituted. In some embodiments the shortened hairpin 2 region has 6-15 modified nucleotides.

### D. 3′ Tail

[0527] In some embodiments, the gRNA comprises a 3′ tail. In some embodiments, the 3′ tail is 1-20 nucleotides in length and is linked by a phosphodiester or a phosphorothioate linkage, to the 3′ end of the conserved region of a gRNA. In some embodiments, the 3′ tail comprises 1, 2, 3, 4, 5, 6, 7, 8, 9, or 10 nucleotides. In some embodiments, the 3′ tail comprises 1, 2, 3, 4, or 5 nucleotides. In some embodiments, the 3′ tail comprises 1 or 2 nucleotides.

[0528] In some embodiments, the 3′ tail has a length of 1-10 nucleotides, 1-5 nucleotides, 1-4 nucleotides, 1-3 nucleotides, and 1-2 nucleotides. In some embodiments, the 3′ tail comprises about 1, 2, 3, 4, 5, 6, 7, 8, 9, or 10 nucleotides. In some embodiments, the 3′ tail has a length of 1 nucleotide. In some embodiments, the 3′ tail has a length of 2 nucleotides. In some embodiments, the 3′ tail has a length of 3 nucleotides. In some embodiments, the 3′ tail has a length of 4 nucleotides. In some embodiments, the 3′ tail has a length of 1-2, nucleotides.

[0529] In some embodiments, the 3′ tail terminates with a nucleotide comprising a uracil or modified uracil. In some embodiments, the 3′ tail is 1 nucleotide in length. In some embodiments, the 3′ tail consists of a nucleotide comprising a uracil or modified uracil. In some embodiments, wherein the 3′ tail comprises a modification of any one or more of the nucleotides present in the 3′ tail. In further embodiments, wherein the modification of the 3′ tail is one or more of 2′-O-methyl (2′-OMe) modified nucleotide and a phosphorothioate (PS) linkage between nucleotides.

[0530] In some embodiments, the 3′ tail is fully modified.

[0531] In some embodiments, the 3′ nucleotide of the gRNA is a nucleotide comprising a uracil or modified uracil.

[0532] In some embodiments, one or more of nucleotides 144 and 145 are deleted relative to SEQ ID NO: 500. In some embodiments, both nucleotides 144 and 145 are deleted relative to SEQ ID NO: 500.

[0533] In some embodiments, the gRNA does not comprise a 3′ tail. In some embodiments, the 3′ end of the guide, that does not comprise a 3′ tail, terminates with a nucleotide comprising a uracil or modified uracil. In some embodiments, the 3′ tail consists of a nucleotide comprising a uracil or modified uracil. In some embodiments, the 3′ terminal nucleotide is a modified nucleotide. In some embodiments, the modification of the 3′ end is one or more of 2′-O-methyl (2′-OMe) modified nucleotide and a phosphorothioate (PS) linkage between nucleotide the terminal nucleotide and the penultimate nucleotide.

[0534] In some embodiments, the 3′ end, i.e., the end of hairpin 2 with no further tail or the end of the 3′ tail, comprises or further comprises one or more modifications, e.g., a phosphorothioate (PS) linkage between nucleotides, a 2′-OMe modified nucleotide, a 2′-O-moe modified nucleotide, a 2′-F modified nucleotide, an inverted abasic modified nucleotide, and a combination thereof. In some embodiments, the 3′ end comprises or further comprises one or more modifications, e.g., a phosphorothioate (PS) linkage between nucleotides, a 2′-OMe modified nucleotide, a 2′-F modified nucleotide, and a combination thereof. In some embodiments, the 3′ end comprises phosphorothioate (PS) linkage between nucleotides 141 and 142, and 142 and 143; a 2′-OMe modified nucleotide at each of positions 142 and 143.

[0535] In some embodiments, the 3′ end, i.e., the end of hairpin 2 with no further tail or the end of the 3′ tail, comprises or further comprises one or more phosphorothioate (PS) linkages between nucleotides. In some embodiments, the 3′ end comprises or further comprises one or more 2′-OMe modified nucleotides. In some embodiments, the 3′ end comprises or further comprises one or more 2′-O-moe modified nucleotides. In some embodiments, the 3′ end comprises or further comprises one or more 2′-F modified nucleotide. In some embodiments, the 3′ end comprises or further comprises one or more an inverted abasic modified nucleotides. In some embodiments, the 3′ end comprises or further comprises one or more protective end modifications. In some embodiments, the 3′ end comprises or further comprises a combination of one or more of a phosphorothioate (PS) linkage between nucleotides, a 2′-OMe modified nucleotide, a 2′-O-moe modified nucleotide, a 2′-F modified nucleotide, and an inverted abasic modified nucleotide.

### E. Guide Sequence

[0536] In some embodiments, the gRNA further comprises a guide sequence. In some embodiments, the guide sequence comprises 20, 21, 22, 23, 24, or 25 nucleotides, optionally 22, 23, 24, or 25 nucleotides 5′ to the most 5′ nucleotide of the repeat/anti-repeat region. In some embodiments, the guide sequence comprises 22, 23, 24, 25, or more nucleotides. In some embodiments, the guide sequence has a has a length of 24 nucleotides. In some embodiments, the guide sequence has a length of 23 nucleotides. In some embodiments, the guide sequence has a length of 22 nucleotides. In some embodiments, the guide sequence has a length of 21 nucleotides. In some embodiments, the guide sequence has a length of 20 nucleotides.

[0537] In some embodiments, the guide region has (i) an insertion of one nucleotide or a deletion of 1-4 nucleotides within positions 1-24 relative to SEQ ID NO: 500, or (ii) a length of 24 nucleotides.

[0538] In some embodiments, the selection of the guide sequence is determined based on target sequences within the gene of interest for editing. For example, in some embodiments, the gRNA comprises a guide sequence that is complementary to target sequences of a gene of interest.

[0539] In some embodiments, the target sequence in the gene of interest may be complementary to the guide sequence of the gRNA. In some embodiments, the degree of complementarity or identity between a guide sequence of a gRNA and its corresponding target sequence in the gene of interest may be about 90%, 95%, or 100%. In some embodiments, the guide region of a gRNA and the target region of a gene of interest may be 100% complementary or identical. In other embodiments, the guide sequence of a gRNA and the target sequence of a gene of interest may contain at least one mismatch. For example, the guide sequence of a gRNA and the target sequence of a gene of interest may contain 1, optionally 2, or 3 mismatches, where the total length of the target sequence is at least about 22, 23, 24, or more nucleotides. In some embodiments, the guide sequence of a gRNA and the target region of a gene of interest may contain 1, optionally 2, or 3 mismatches where the guide sequence comprises about 24 nucleotides. In certain embodiments, the guide sequence contains no mismatches, i.e., is fully complementary, to the target sequence. The 5′ terminus may comprise nucleotides that are not considered guide regions (i.e., do not function to direct a Cas9 protein to a target nucleic acid).

II. Modified Guide RNA (gRNA)

[0540] Guide RNAs comprising modifications at various positions are disclosed herein. In some embodiments, a position of a gRNA that comprises a modification is modified with any one or more of the following types of modifications. The term “modified gRNA” generally refers to a gRNA having a modification to the chemical structure of one or more of the bases, the sugar, the phosphodiester linkage or backbone portions, including nucleotide phosphates, all as detailed and exemplified herein.

[0541] In some embodiments, the guide region of the gRNA comprises at least one modified nucleotide.

[0542] In some embodiments, the guide region of the gRNA comprises at least two modified nucleotides, optionally at least four modified nucleotides, wherein each modification, independently, optionally comprises a modified nucleotide selected from 2′-O-methyl (2′-OMe) modified nucleotide, 2′-O-(2-methoxyethyl) (2′-O-moe) modified nucleotide, a 2′-fluoro (2′-F) modified nucleotide, a phosphorothioate (PS) linkage between nucleotides, an inverted abasic modified nucleotide, or combinations thereof.

[0543] In some embodiments, the guide region of the gRNA comprises 1, 2, 3, 4, 5, 6, 7, 8, 9, 10, 11, or 12 modified nucleotides. In some embodiments, the guide region of the gRNA comprises 1, 2, or 3 modified nucleotides. In some embodiments, the guide region of the gRNA comprises 4, 5, 6, 7, 8, 9, 10, 11, or 12 modified nucleotides. In some embodiments, the guide region of the gRNA comprises 6, 7, 8, 9, 10, 11, or 12 modified nucleotides.

[0544] In some embodiments, the gRNA comprises a 5′ end modification. In some embodiments, the gRNA further comprises a 3′ end modification.

[0545] In some embodiments, the guide region does not comprise a modified nucleotide 3′ of the first three nucleotides of the guide region.

[0546] In some embodiments, the guide region does not comprise a modified nucleotide.

[0547] In some embodiments, wherein the gRNA comprises a 3′ end modification. In some embodiments, the gRNA comprises a modification in the upper stem region of the repeat/anti-repeat region. In some embodiments, the gRNA comprises a modification in the hairpin 1 region. In some embodiments, the gRNA comprises a modification in the hairpin 2 region. In some embodiments, the gRNA comprises a 3′ end modification, and comprising a modification in the upper stem region of the repeat/anti-repeat region. In some embodiments, the gRNA comprises a 3′ end modification, and a modification in the hairpin 1 region. In some embodiments, the gRNA comprises a 3′ end modification, and a modification in the hairpin 2 region. In some embodiments, the gRNA comprises a 5′ end modification, and comprising a modification in the upper stem region of the repeat/anti-repeat region. In some embodiments, the gRNA comprises a 5′ end modification, and a modification in the hairpin 1 region. In some embodiments, the gRNA comprises a 5′ end modification, and a modification in the hairpin 2 region. In some embodiments, the gRNA comprises a 5′ end modification, a modification in the upper stem region of the repeat/anti-repeat region, and a 3′ end modification. In some embodiments, the gRNA comprises a 5′ end modification, a modification in the hairpin 1 region, and a 3′ end modification. In some embodiments, the gRNA comprises a 5′ end modification, a modification in the hairpin 1 region, a modification in the hairpin 2 region, and a 3′ end modification. In some embodiments, the gRNA comprises a 5′ end modification, a modification in the repeat/anti-repeat region, a modification in the hairpin 1 region, a modification in the hairpin 2 region, and a 3′ end modification.

[0548] In some embodiments, the gRNA does not comprise a modification at position 76. In some embodiments, the gRNA does not comprise a PS modification at position 76, i.e., a PS modification between nucleotides 76 and 77.

[0549] In some embodiments, the gRNA comprises one or more, i.e., 1, 2, 3, or 4 modifications at positions 106-109. In some embodiments, the gRNA comprises modifications at positions 106-109. In some embodiments, the modification comprises a 2′-O-methyl (2′-O-Me) modified nucleotide.

[0550] In some embodiments, the gRNA comprises a 2′-O-methyl (2′-O-Me) modified nucleotide. In some embodiments, the gRNA comprises a 2′-O-(2-methoxyethyl) (2′-O-moe) modified nucleotide. In some embodiments, the gRNA comprises a 2′-fluoro (2′-F) modified nucleotide. In some embodiments, the gRNA comprises a phosphorothioate (PS) bond between nucleotides.

[0551] In some embodiments, the gRNA comprises a 5′ end modification, a 3′ end modification, or 5′ and 3′ end modification, such as a protective end modification. In some embodiments, the 5′ end modification comprises a phosphorothioate (PS) bond between nucleotides. In some embodiments, the 5′ end modification comprises a 2′-O-methyl (2′-O-Me), 2′-O-(2-methoxyethyl) (2′-O-moe), or 2′-fluoro (2′-F) modified nucleotide. In some embodiments, the 5′ end modification comprises at least one phosphorothioate (PS) bond and one or more of a 2′-O-methyl (2′-O-Me), 2′-O-(2-methoxyethyl) (2′-O-moe), or 2′-fluoro (2′-F) modified nucleotide. The end modification may comprise a phosphorothioate (PS), 2′-O-methyl (2′-O-Me), 2′-O-(2-methoxyethyl) (2′-O-moe), or 2′-fluoro (2′-F) modification. Equivalent end modifications are also encompassed by embodiments described herein. In some embodiments, the gRNA comprises an end modification in combination with a modification of one or more regions of the gRNA.

[0552] Exemplary patterns of modifications are shown in Tables 1-2. In certain embodiments, exemplary modifications include patterns of modifications shown in Tables 1-2 in which 3′ tails, when present, are deleted. Additional exemplary patterns are discussed below.

### Types of Chemical Modifications Described Herein

### 2′-O-Methyl Modifications

[0553] Modified sugars are believed to control the puckering of nucleotide sugar rings, a physical property that influences oligonucleotide binding affinity for complementary strands, duplex formation, and interaction with nucleases. Substitutions on sugar rings can therefore alter the conformation and puckering of these sugars. For example, 2′-O-methyl (2′-OMe) modifications can increase binding affinity and nuclease stability of oligonucleotides, though as shown in the Examples, the effect of any modification at a given position in an oligonucleotide needs to be empirically determined.

[0554] The terms “mA,” “mC,” “mU,” or “mG” may be used to denote a nucleotide that has been modified with 2′-OMe.

[0555] A ribonucleotide and a modified 2′-O-methyl ribonucleotide can be depicted as follows:

[chemical structure]

### 2′-O-(2-Methoxyethyl) Modifications

[0556] In some embodiments, the modification may be 2′-O-(2-methoxyethyl) (2′-O-moe). A modified 2′-O-moe ribonucleotide can be depicted as follows:

[chemical structure]

[0557] The terms “moeA,” “moeC,” “moeU,” or “moeG” may be used to denote a nucleotide that has been modified with 2′-O-moe.

### 2′-Fluoro Modifications

[0558] Another chemical modification that has been shown to influence nucleotide sugar rings is halogen substitution. For example, 2′-fluoro (2′-F) substitution on nucleotide sugar rings can increase oligonucleotide binding affinity and nuclease stability.

[0559] In this application, the terms “fA,” “fC,” “fJ,” or “fG” may be used to denote a nucleotide that has been substituted with 2′-F.

[0560] A ribonucleotide without and with a 2′-F substitution can be depicted as follows:

[chemical structure]

### Phosphorothioate Modifications

[0561] A phosphorothioate (PS) linkage or bond refers to a bond where a sulfur is substituted for one nonbridging phosphate oxygen in a phosphodiester linkage, for example between nucleotides. When phosphorothioates are used to generate oligonucleotides, the modified oligonucleotides may also be referred to as S-oligos.

[0562] A “*” may be used to depict a PS modification. In this application, the terms A*, C*, U*, or G* may be used to denote a nucleotide that is linked to the next (e.g., 3′) nucleotide with a PS bond. Throughout this application, PS modifications are grouped with the nucleotide whose 3′ carbon is bonded to the phosphorothioate; thus, indicating that a PS modification is at position 1 means that the phosphorothioate is bonded to the 3′ carbon of nucleotide 1 and the 5′ carbon of nucleotide 2.

[0563] In this application, the terms “mA*,” “mC*,” “mU*,” or “mG*” may be used to denote a nucleotide that has been substituted with 2′-OMe and that is linked to the next (e.g., 3′) nucleotide with a PS linkage, which may sometimes be referred to as a “PS bond.” Similarly, the terms “fA*,” “fC*,” “fU*,” or “fG*” may be used to denote a nucleotide that has been substituted with 2′-F and that is linked to the next (e.g., 3′) nucleotide with a PS linkage. Equivalents of a PS linkage or bond are encompassed by embodiments described herein.

[0564] The diagram below shows the substitution of S- for a nonbridging phosphate oxygen, generating a PS linkage in lieu of a phosphodiester linkage:

[chemical structure]

### Inverted Abasic Modifications

[0565] Abasic nucleotides refer to those which lack nitrogenous bases. The figure below depicts an oligonucleotide with an abasic (in this case, shown as apurinic; an abasic site could also be an apyrimidinic site, wherein the description of the abasic site is typically in reference to Watson-Crick base pairing—e.g., an apurinic site refers to a site that lacks a nitrogenous base and would typically base pair with a pyrimidinic site) site that lacks a base, wherein the base may be substituted by another moiety at the 1′ position of the furan ring (e.g., a hydroxyl group, as shown below, to form a ribose or deoxyribose site, as shown below, or a hydrogen):

[chemical structure]

[0566] Inverted bases refer to those with linkages that are inverted from the normal 5′ to 3′ linkage (i.e., either a 5′ to 5′ linkage or a 3′ to 3′ linkage). For example:

[chemical structure]

[0567] An abasic nucleotide can be attached with an inverted linkage. For example, an abasic nucleotide may be attached to the terminal 5′ nucleotide via a 5′ to 5′ linkage, or an abasic nucleotide may be attached to the terminal 3′ nucleotide via a 3′ to 3′ linkage. An inverted abasic nucleotide at either the terminal 5′ or 3′ nucleotide may also be called an inverted abasic end cap. In this application, the terms “invd” indicates an inverted abasic nucleotide linkage.

### Deoxyribonucleotides

[0568] A deoxyribonucleotide (in which the sugar comprises a 2′-deoxy position) is considered a modification in the context of a gRNA, in that the nucleotide is modified relative to standard RNA by the substitution of a proton for a hydroxyl at the 2′ position. Unless otherwise indicated, a deoxyribonucleotide modification at a position that is U in an unmodified RNA can also comprise replacement of the U nucleobase with a T.

### Bicyclic Ribose Analog

[0569] Exemplary bicyclic ribose analogs include locked nucleic acid (LNA), ENA, bridged nucleic acid (BNA), or another LNA-like modifications. In some instances, a bicyclic ribose analog has 2′ and 4′ positions connected through a linker. The linker can be of the formula —X—(CH₂)ₙ— where n is 1 or 2; X is O, NR, or S; and R is H or C₁₋₃ alkyl, e.g., methyl. Examples of bicyclic ribose analogs include LNAs comprising a 2′-O—CH₂-4′ bicyclic structure (oxy-LNA) (see WO 98/39352 and WO 99/14226); 2′-NH—CH₂-4′ or 2′-N(CH₃)—CH₂-4′ (amino-LNAs) (Singh et al., J. Org. Chem. 63:10035-10039 (1998); Singh et al., J. Org. Chem. 63:6078-6079 (1998)); and 2′-S—CH₂-4′ (thio-LNA) (Singh et al., J. Org. Chem. 63:6078-6079 (1998); Kumar et al., Biorg. Med. Chem. Lett. 8:2219-2222 (1998)).

### ENA

[0570] An ENA modification refers to a nucleotide comprising a 2′-O,4′-C-ethylene modification. An exemplary structure of an ENA nucleotide is shown below, in which wavy lines indicate connections to the adjacent nucleotides (or terminal positions as the case may be, with the understanding that if the 3′ terminal nucleotide is an ENA nucleotide, the 3′ position may comprise a hydroxyl rather than phosphate). For further discussion of ENA nucleotides, see, e.g., Koizumi et al., Nucleic Acids Res. 31: 3267-3273 (2003).

[chemical structure]

### UNA

[0571] A UNA or unlocked nucleic acid modification refers to a nucleotide comprising a 2′,3′-seco-RNA modification, in which the 2′ and 3′ carbons are not bonded directly to each other. An exemplary structure of a UNA nucleotide is shown below, in which wavy lines indicate connections to the adjacent phosphates or modifications replacing phosphates (or terminal positions as the case may be). For further discussion of UNA nucleotides, see, e.g., Snead et al., Molecular Therapy 2: e103, doi:10.1038/mtna.2013.36 (2013).

[chemical structure]

### Base Modifications

[0572] A base modification is any modification that alters the structure of a nucleobase or its bond to the backbone, including isomerization (as in pseudouridine). In some embodiments, a base modification includes inosine. In some embodiments, a modification comprises a base modification that reduces RNA endonuclease activity, e.g., by interfering with recognition of a cleavage site by an RNase or by stabilizing an RNA structure (e.g., secondary structure) that decreases accessibility of a cleavage site to an RNase. Exemplary base modifications that can stabilize RNA structures are pseudouridine and 5-methylcytosine. See Peacock et al., J Org Chem. 76: 7295-7300 (2011). In some embodiments, a base modification can increase or decrease the melting temperature (Tm) of a nucleic acid, e.g., by increasing the hydrogen bonding in a Watson-Crick base pair, forming non-canonical base pair, or creating a mismatched base pair.

[0573] The above modifications and their equivalents are included within the scope of the embodiments described herein.

### 3′ End Modifications

[0574] In some embodiments, the terminal (i.e., last) 1, 2, 3, or 4, optionally 5, 6, or 7 nucleotides in the 3′ end are modified. Throughout, this modification may be referred to as a “3′ end modification”. In some embodiments, the terminal (i.e., last) 1, 2, 3, or 4, optionally 5, 6, or 7 nucleotides in the 3′ end comprise more than one modification. In some embodiments, at least one of the terminal (i.e., last) 1, 2, 3, or 4, optionally 5, 6, or 7 nucleotides in the 3′ end are modified. In some embodiments, at least two of the terminal (i.e., last) 1, 2, 3, or 4, optionally 5, 6, or 7 nucleotides in the 3′ end are modified. In some embodiments, at least three of the terminal (i.e., last) 1, 2, 3, or 4, optionally 5, 6, or 7 nucleotides in the 3′ end are modified. In some embodiments, the modification comprises a PS linkage. In some embodiments, the modification to the 3′ end is a 3′ protective end modification. In some embodiments, the 3′ end modification comprises a 3′ protective end modification.

[0575] In some embodiments, the 3′ end modification comprises a modified nucleotide selected from 2′-O-methyl (2′-O-Me) modified nucleotide, 2′-O-(2-methoxyethyl) (2′-O-moe) modified nucleotide, a 2′-fluoro (2′-F) modified nucleotide, a phosphorothioate (PS) linkage between nucleotides, or an inverted abasic modified nucleotide, optionally wherein the gRNA comprises at least two 3′ end modifications independently selected from a 2′-O-methyl (2′-OMe) modified nucleotide, 2′-O-(2-methoxyethyl) (2′-O-moe) modified nucleotide, a 2′-fluoro (2′-F) modified nucleotide, a phosphorothioate (PS) linkage between nucleotides, and an inverted abasic modified nucleotide.

[0576] In some embodiments, the 3′ end modification comprises or further comprises a 2′-O-methyl (2′-O-Me) modified nucleotide.

[0577] In some embodiments, the 3′ end modification comprises or further comprises a 2′-fluoro (2′-F) modified nucleotide.

[0578] In some embodiments, the 3′ end modification comprises or further comprises a phosphorothioate (PS) linkage between nucleotides.

[0579] In some embodiments, the 3′ end modification comprises or further comprises an inverted abasic modified nucleotide.

[0580] In some embodiments, the 3′ end modification comprises or further comprises a 2′-O-methyl (2′-O-Me) modified nucleotide and a phosphorothioate (PS) linkage between nucleotides.

[0581] In some embodiments, the 3′ end modification comprises or further comprises a modification of any one or more of the last 1, 2, 3, or 4, optionally 5, 6, or 7 nucleotides. In some embodiments, the 3′ end modification comprises or further comprises one modified nucleotide. In some embodiments, the 3′ end modification comprises or further comprises two modified nucleotides. In some embodiments, the 3′ end modification comprises or further comprises three modified nucleotides. In some embodiments, the 3′ end modification comprises or further comprises four modified nucleotides. In some embodiments, the 3′ end modification comprises or further comprises five modified nucleotides. In some embodiments, the 3′ end modification comprises or further comprises six modified nucleotides. In some embodiments, the 3′ end modification comprises or further comprises seven modified nucleotides.

[0582] In some embodiments, the 3′ end modification comprises or further comprises a modification of 1-7 or 14 nucleotides.

[0583] In some embodiments, the 3′ end modification comprises or further comprises modifications of 1, 2, 3, or 4, optionally 5, 6, or 7 nucleotides at the 3′ end of the gRNA.

[0584] In some embodiments, the 3′ end modification comprises or further comprises modifications of about 1-3, 1-4, or 1-5 nucleotides at the 3′ end of the gRNA.

[0585] In some embodiments, the 3′ end modification comprises or further comprises any one or more of the following: a phosphorothioate (PS) linkage between nucleotides, a 2′-O-Me modified nucleotide, a 2′-O-moe modified nucleotide, a 2′-F modified nucleotide, an inverted abasic modified nucleotide, and a combination thereof.

[0586] In some embodiments, the 3′ end modification comprises or further comprises 1, 2, 3, or 4, optionally 5, 6, or 7 PS linkages between nucleotides.

[0587] In some embodiments, the 3′ end modification comprises or further comprises at least one 2′-O-Me, 2′-O-moe, inverted abasic, or 2′-F modified nucleotide. In some embodiments, the 3′ end modification comprises or further comprises one PS linkage, wherein the linkage is between the last and second to last nucleotide. In some embodiments, the 3′ end modification comprises or further comprises two PS linkages between the last three nucleotides. In some embodiments, the 3′ end modification comprises or further comprises four PS linkages between the last four nucleotides.

[0588] In some embodiments, the 3′ end modification comprises or further comprises PS linkages between any one or more of the last four nucleotides. In some embodiments, the 3′ end modification comprises or further comprises PS linkages between any one or more of the last three nucleotides. In some embodiments, the 3′ end modification comprises or further comprises PS linkages between any one or more of the last 2, 3, or 4, optionally 5, 6, or 7 nucleotides.

[0589] In some embodiments, the 3′ end modification comprises or further comprises a modification of one or more of the last 1-4, optionally 1-7 nucleotides, wherein the modification is a PS linkage, inverted abasic nucleotide, 2′-OMe, 2′-O-moe, 2′-F, or combinations thereof.

[0590] In some embodiments, the 3′ end modification comprises or further comprises a modification to the last nucleotide with 2′-OMe, 2′-O-moe, 2′-F, or combinations thereof, and an optionally one or two PS linkages to the next nucleotide or the first nucleotide of the 3′ end.

[0591] In some embodiments, the 3′ end modification comprises or further comprises a modification to the last or second to last nucleotide with 2′-OMe, 2′-O-moe, 2′-F, or combinations thereof, and optionally one or more PS linkages.

[0592] In some embodiments, the 3′ end modification comprises or further comprises a modification to the last, second to last, or third to last nucleotides with 2′-OMe, 2′-O-moe, 2′-F, or combinations thereof, and optionally one or more PS linkages.

[0593] In some embodiments, the 3′ end modification comprises or further comprises a modification to the last, second to last, third to last, or fourth to last nucleotides with 2′-OMe, 2′-O-moe, 2′-F, or combinations thereof, and optionally one or more PS linkages.

[0594] In some embodiments, the 3′ end modification comprises or further comprises a modification to the last, second to last, third to last, fourth to last, or fifth to last nucleotides with 2′-OMe, 2′-O-moe, 2′-F, or combinations thereof, and optionally one or more PS linkages.

[0595] In some embodiments, the gRNA comprising a 3′ end modification comprises or further comprises a 3′ tail, wherein the 3′ tail comprises a modification of any one or more of the nucleotides present in the 3′ tail. In some embodiments, the 3′ tail is fully modified. In some embodiments, the 3′ tail comprises 1, 2, 3, 4, 5, 6, 7, 8, 9, 10, 1-2, 1-3, 1-4, 1-5, 1-6, 1-7, 1-8, 1-9, or 1-10 nucleotides, optionally where any one or more of these nucleotides are modified. In some embodiments, the 3′ tail comprises 1-4 nucleotides, optionally 1-2 nucleotides.

[0596] In some embodiments, a gRNA is provided comprising a 3′ end modification, wherein the 3′ end modification comprises the 3′ end modification as shown in any one of SEQ ID NOs: In some embodiments, a gRNA is provided comprising a 5′ end modification, wherein the 5′ end modification comprises a 5′ end modification as shown in any one of SEQ ID NOs: 4-9 and 301-494. In some embodiments, a gRNA is provided comprising a 3′ protective end modification.

[0597] In some embodiments, the gRNA comprises a 5′ end modification and a 3′ end modification.

### 5′ End Modifications

[0598] In some embodiments, the 5′ end is modified, for example, the first 1, 2, 3, or 4, optionally 5, 6, or 7 nucleotides of the gRNA are modified. Throughout, this modification may be referred to as a “5′ end modification”. In some embodiments, the first 1, 2, 3, or 4, optionally 5, 6, or 7 nucleotides of the 5′ end comprise more than one modification. In some embodiments, at least one of the terminal (i.e., first) 1, 2, 3, or 4, optionally 5, 6, or 7 nucleotides at the 5′ end are modified. In some embodiments, at least two of the terminal 1, 2, 3, or 4, optionally 5, 6, or 7 nucleotides at the 5′ end are modified. In some embodiments, at least three of the terminal 1, 2, 3, or 4, optionally 5, 6, or 7 nucleotides at the 5′ end are modified. In some embodiments, the 5′ end modification is a 5′ protective end modification.

[0599] In some embodiments, both the 5′ and 3′ ends of the gRNA are modified. In some embodiments, only the 5′ end of the gRNA is modified. In some embodiments, only the 3′ end of the conserved region of a gRNA is modified.

[0600] In some embodiments, the gRNA comprises modifications at 1, 2, 3, or 4, optionally 5, 6, or 7 of the first 4 nucleotides, optionally the first 7 nucleotides at a 5′ terminus region of the gRNA. In some embodiments, the gRNA comprises modifications at 1, 2, 3, or 4, optionally 5, 6, or 7 of the 4 terminal nucleotides, optionally 7 terminal nucleotides at a 3′ end. In some embodiments, 1, 2, 3, or 4 of the first 4 nucleotides at the 5′ end, or 1, 2, 3, or 4 of the terminal 4 nucleotides at the 3′ end are modified. In some embodiments, 2, 3, or 4 of the first 4 nucleotides at the 5′ end are linked with phosphorothioate (PS) bonds.

[0601] In some embodiments, the modification to the 5′ terminus or 3′ terminus comprises a 2′-O-methyl (2′-O-Me) or 2′-O-(2-methoxyethyl) (2′-O-moe) modification. In some embodiments, the modification comprises a 2′-fluoro (2′-F) modification to a nucleotide. In some embodiments, the modification comprises a phosphorothioate (PS) linkage between nucleotides. In some embodiments, the modification comprises an inverted abasic nucleotide. In some embodiments, the modification comprises a protective end modification. In some embodiments, the modification comprises a more than one modification selected from protective end modification, 2′-O-Me, 2′-O-moe, 2′-fluoro (2′-F), a phosphorothioate (PS) linkage between nucleotides, and an inverted abasic nucleotide. In some embodiments, an equivalent modification is encompassed.

[0602] In some embodiments, the gRNA comprises one or more phosphorothioate (PS) linkages between the first one, two, three, four, five, six, or seven nucleotides at the 5′ terminus. In some embodiments, the gRNA comprises one or more PS linkages between the last one, two, three, or four, optionally five, six, or seven nucleotides at the 3′ terminus. In some embodiments, the gRNA comprises one or more PS linkages between both the last one, two, three, or four, optionally five, six, or seven nucleotides at the 3′ terminus and the first one, two, three, or four, optionally five, six, or seven nucleotides from the 5′ end of the 5′ terminus. In some embodiments, in addition to PS linkages, the 5′ and 3′ terminal nucleotides may comprise 2′-O-Me, 2′-O-moe, or 2′-F modified nucleotides.

[0603] In some embodiments, the gRNA comprises a 5′ end modification, e.g., wherein the first nucleotide of the guide region is modified. In some embodiments, the gRNA comprises a 5′ end modification, wherein the first nucleotide of the guide region comprises a 5′ protective end modification.

[0604] In some embodiments, the 5′ end modification comprises a modified nucleotide selected from a 2′-O-methyl (2′-O-Me) modified nucleotide, 2′-O-(2-methoxyethyl) (2′-O-moe) modified nucleotide, a 2′-fluoro (2′-F) modified nucleotide, a phosphorothioate (PS) linkage between nucleotides, an inverted abasic modified nucleotide, optionally wherein the gRNA comprises at least two 5′ end modifications independently selected from a 2′-O-methyl (2′-OMe) modified nucleotide, 2′-O-(2-methoxyethyl) (2′-O-moe) modified nucleotide, a 2′-fluoro (2′-F) modified nucleotide, a phosphorothioate (PS) linkage between nucleotides, and an inverted abasic modified nucleotide.

[0605] In some embodiments, the 5′ end modification comprises or further comprises a 2′-O-methyl (2′-O-Me) modified nucleotide.

[0606] In some embodiments, the 5′ end modification comprises or further comprises a 2′-fluoro (2′-F) modified nucleotide.

[0607] In some embodiments, the 5′ end modification comprises or further comprises a phosphorothioate (PS) linkage between nucleotides.

[0608] In some embodiments, the 5′ end modification comprises or further comprises an inverted abasic modified nucleotide.

[0609] In some embodiments, the 5′ end modification comprises or further comprises a 2′-O-methyl (2′-O-Me) modified nucleotide and a phosphorothioate (PS) linkage between nucleotides.

[0610] In some embodiments, the 5′ end modification comprises or further comprises a modification of any one or more of nucleotides 1-4, optionally 1-7 of the guide region of a gRNA. In some embodiments, the 5′ end modification comprises or further comprises one modified nucleotide. In some embodiments, the 5′ end modification comprises or further comprises two modified nucleotides. In some embodiments, the 5′ end modification comprises or further comprises three modified nucleotides. In some embodiments, the 5′ end modification comprises or further comprises four modified nucleotides. In some embodiments, the 5′ end modification comprises or further comprises five modified nucleotides. In some embodiments, the 5′ end modification comprises or further comprises six modified nucleotides. In some embodiments, the 5′ end modification comprises or further comprises seven modified nucleotides.

[0611] In some embodiments, the 5′ end modification comprises or further comprises a modification of 1-7, 1-5, 1-4, 1-3, or 1-2 nucleotides.

[0612] In some embodiments, the 5′ end modification comprises or further comprises modifications of 1, 2, 3, or 4, optionally 5, 6, or 7 nucleotides from the 5′ end. In some embodiments, the 5′ end modification comprises or further comprises modifications of about 1-3, 1-4, 1-5, 1-6, or 1-7 nucleotides from the 5′ end.

[0613] In some embodiments, the 5′ end modification comprises or further comprises modifications at the first nucleotide at the 5′ end of the gRNA. In some embodiments, the 5′ end modification comprises or further comprises modifications at the first and second nucleotide from the 5′ end of the gRNA. In some embodiments, the 5′ end modification comprises or further comprises modifications at the first, second, and third nucleotide from the 5′ end of the gRNA. In some embodiments, the 5′ end modification comprises or further comprises modifications at the first, second, third, and fourth nucleotide from the 5′ end of the gRNA. In some embodiments, the 5′ end modification comprises or further comprises modifications at the first, second, third, fourth, and fifth nucleotide from the 5′ end of the gRNA. In some embodiments, the 5′ end modification comprises or further comprises modifications at the first, second, third, fourth, fifth, and sixth nucleotide from the 5′ end of the gRNA. In some embodiments, the 5′ end modification comprises or further comprises modifications at the first, second, third, fourth, fifth, sixth, and seventh nucleotide from the 5′ end of the gRNA.

[0614] In some embodiments, the 5′ end modification comprises or further comprises a phosphorothioate (PS) linkage between nucleotides, or a 2′-O-Me modified nucleotide, or a 2′-O-moe modified nucleotide, or a 2′-F modified nucleotide, or an inverted abasic modified nucleotide, or combinations thereof.

[0615] In some embodiments, the 5′ end modification comprises or further comprises 1, 2, 3, 4, 5, 6, or 7 PS linkages between nucleotides. In some embodiments, the 5′ end modification comprises or further comprises about 1-2, 1-3, 1-4, 1-5, 1-6, or 1-7 PS linkages between nucleotides.

[0616] In some embodiments, the 5′ end modification comprises or further comprises at least one PS linkage, wherein if there is one PS linkage, the linkage is between nucleotides 1 and 2 of the guide region.

[0617] In some embodiments, the 5′ end modification comprises or further comprises at least two PS linkages, and the linkages are between nucleotides 1 and 2, and 2 and 3 of the guide region.

[0618] In some embodiments, the 5′ end modification comprises or further comprises PS linkages between any one or more of nucleotides 1 and 2, 2 and 3, and 3 and 4 of the guide region.

[0619] In some embodiments, the 5′ end modification comprises or further comprises PS linkages between any one or more of nucleotides 1 and 2, 2 and 3, 3 and 4, and 4 and 5 of the guide region.

[0620] In some embodiments, the 5′ end modification comprises or further comprises PS linkages between any one or more of nucleotides 1 and 2, 2 and 3, 3 and 4, 4 and 5, and 5 and 6 of the guide region.

[0621] In some embodiments, the 5′ end modification comprises or further comprises PS linkages between any one or more of nucleotides 1 and 2, 2 and 3, 3 and 4, 4 and 5, 5 and 6, and 7 and 8 of the guide region.

[0622] In some embodiments, the 5′ end modification comprises or further comprises a modification of one or more of nucleotides 1-7 of the guide region, wherein the modification is a PS linkage, inverted abasic nucleotide, 2′-O-Me, 2′-O-moe, 2′-F, or combinations thereof.

[0623] In some embodiments, the 5′ end modification comprises or further comprises a modification to the first nucleotide of the guide region with 2′-O-Me, 2′-O-moe, 2′-F, or combinations thereof, and an optional PS linkage to the next nucleotide;

[0624] In some embodiments, the 5′ end modification comprises or further comprises a modification to the first or second nucleotide of the guide region with 2′-O-Me, 2′-O-moe, 2′-F, or combinations thereof, and optionally one or more PS linkages between the first and second nucleotide or between the second and third nucleotide.

[0625] In some embodiments, the 5′ end modification comprises or further comprises a modification to the first, second, or third nucleotides of the variable region with 2′-O-Me, 2′-O-moe, 2′-F, or combinations thereof, and optionally one or more PS linkages between the first and second nucleotide, between the second and third nucleotide, or between the third and the fourth nucleotide.

[0626] In some embodiments, the 5′ end modification comprises or further comprises a modification to the first, second, third, or fourth nucleotides of the variable region with 2′-O-Me, 2′-O-moe, 2′-F, or combinations thereof, and optionally one or more PS linkages between the first and second nucleotide, between the second and third nucleotide, between the third and the fourth nucleotide, or between the fourth and the fifth nucleotide.

[0627] In some embodiments, the 5′ end modification comprises or further comprises a modification to the first, second, third, fourth, or fifth nucleotides of the variable region with 2′-O-Me, 2′-O-moe, 2′-F, or combinations thereof, and optionally one or more PS linkages between the first and second nucleotide, between the second and third nucleotide, between the third and the fourth nucleotide, between the fourth and the fifth nucleotide, or between the fifth and the sixth nucleotide.

[0628] In some embodiments, a gRNA is provided comprising a 5′ end modification, wherein the 5′ end modification comprises a 5′ end modification as shown in any one of SEQ ID NOs: 4-9 and 301-494, 931-946.

[0629] In some embodiments, the sgRNA comprises a 5′ end modification comprising a 5′ protective end modification. In some embodiments, a gRNA is provided comprising a 5′ end modification, wherein the 5′ end modification comprises 2′-OMe modified nucleotides at nucleotides 1, 2, and 3 of the guide region.

[0630] In some embodiments, a gRNA is provided comprising a 5′ end modification, wherein the 5′ end modification comprises 2′-OMe modified nucleotides at nucleotides 1, 2, and 3 of the guide region and PS linkages between nucleotides 1 and 2, 2 and 3, and 3 and 4 of the guide region.

[0631] In some embodiments, a gRNA is provided comprising a 5′ end modification, wherein the 5′ end modification comprises 2′-OMe modified nucleotides at nucleotides 1, 2, 3, 4, and 5 of the guide region.

[0632] In some embodiments, a gRNA is provided comprising a 5′ end modification, wherein the 5′ end modification comprises 2′-OMe modified nucleotides at nucleotides 1, 2, 3, 4, and 5 of the guide region and PS linkages between nucleotides 1 and 2, 2 and 3, and 3 and 4 of the guide region.

[0633] In some embodiments, a gRNA is provided comprising a 5′ end modification and a 3′ end modification. In some embodiments, the gRNA comprises modified nucleotides at the 5′ and 3′ terminus, and modified nucleotides in one or more other regions described in Table 3.

[0634] In some embodiments, the sgRNA comprises modified nucleotides that are not at the 5′ or 3′ ends. Exemplary patterns of modifications are described below and in Table 1.

### Repeat/Anti-Repeat Modifications

[0635] In some embodiments, a gRNA is provided comprising a repeat/anti-repeat region modification, wherein the repeat/anti-repeat region modification comprises a modification to any one or more of nucleotides 25-76 in the upper stem region.

[0636] In some embodiments, a gRNA is provided comprising a repeat/anti-repeat region modification, wherein the upper stem modification comprises a modification of at least 1, 2, 3, 4, 5, 6, 7, 8, 9, 10, 11, 12, 13, 14, 15, 16, 17, or 18 nucleotides in the repeat/anti-repeat region.

[0637] In some embodiments, a gRNA is provided comprising an upper stem modification, wherein the upper stem modification comprises a modification of about 1-18, 1-16, 1-15, 5-18, 5-15, 8-18, 8-15, 10-18, 10-15, or 12-15 nucleotides in the repeat/anti-repeat region.

[0638] In some embodiments, a gRNA is provided comprising a repeat/anti-repeat modification, wherein the repeat/anti-repeat modification comprises a 2′-OMe modified nucleotide. In some embodiments, a gRNA is provided comprising a repeat/anti-repeat modification, wherein the repeat/anti-repeat modification comprises a 2′-O-moe modified nucleotide. In some embodiments, a gRNA is provided comprising a repeat/anti-repeat modification, wherein the repeat/anti-repeat modification comprises a 2′-F modified nucleotide.

[0639] In some embodiments, a gRNA is provided comprising a repeat/anti-repeat modification, wherein the repeat/anti-repeat modification comprises a 2′-OMe modified nucleotide, a 2′-O-moe modified nucleotide, a 2′-F modified nucleotide, or combinations thereof.

[0640] In some embodiments, the sgRNA comprises a repeat/anti-repeat modification as shown in any one of the sequences in Table 1 or 2. In some embodiments, the gRNA does not comprise a modification at position 76 in the repeat/anti-repeat region. In some embodiments, the gRNA does not comprise a PS modification at position 76.

[0641] In some embodiments, such a repeat/anti-repeat modification is combined with a 5′ protective end modification, e.g. as shown for the corresponding sequence in Table 1 or 2. In some embodiments, such a repeat/anti-repeat modification is combined with a 3′ protective end modification, e.g. as shown for the corresponding sequence in Table 1 or 2. In some embodiments, such a repeat/anti-repeat modification is combined with 5′ and 3′ end modifications as shown for the corresponding sequence in Table 1 or 2.

[0642] In some embodiments, the gRNA comprises a 5′ end modification and a repeat/anti-repeat modification. In some embodiments, the gRNA comprises a 3′ end modification and a repeat/anti-repeat modification. In some embodiments, the gRNA comprises a 5′ end modification, a 3′ end modification and a repeat/anti-repeat modification.

### Hairpin Modifications

[0643] In some embodiments, the gRNA comprises a modification in the hairpin region (e.g., hairpin 1 region or hairpin 2 region). In some embodiments, the hairpin region modification comprises at least one modified nucleotide selected from a 2′-O-methyl (2′-OMe) modified nucleotide, a 2′-fluoro (2′-F) modified nucleotide, or combinations thereof.

[0644] In some embodiments, the hairpin region modification is in the hairpin 1 region. In some embodiments, the hairpin region modification is in the hairpin 2 region. In some embodiments, modifications are within the hairpin 1 and hairpin 2 regions, optionally wherein a nucleotide between hairpin 1 and 2 is also modified.

[0645] In some embodiments, the hairpin modification comprises or further comprises a 2′-O-methyl (2′-OMe) modified nucleotide.

[0646] In some embodiments, the hairpin modification comprises or further comprises a 2′-fluoro (2′-F) modified nucleotide.

[0647] In some embodiments, the hairpin region modification comprises at least one modified nucleotide selected from a 2′H modified nucleotide (DNA), PS modified nucleotide, a 2′-O-methyl (2′-O-Me) modified nucleotide, a 2′-fluoro (2′-F) modified nucleotide, or combinations thereof.

[0648] In some embodiments, the gRNA comprises one or more, i.e., 1, 2, 3, or 4 modifications at positions 106-109 in the hairpin 2 region. In some embodiments, the gRNA comprises modifications at positions 106-109. In some embodiments, the modification comprises a 2′-O-methyl (2′-O-Me) modified nucleotide.

[0649] In some embodiments, the gRNA comprises a 3′ end modification, and a modification in the hairpin region. In some embodiments, the 3′ end modification is within the hairpin region, i.e., in hairpin 2.

[0650] In some embodiments, the gRNA comprises a 5′ end modification, and a modification in the hairpin region.

[0651] In some embodiments, the gRNA comprises a repeat/anti-repeat modification, and a modification in the hairpin region.

[0652] In some embodiments, the gRNA comprises a hairpin modification as shown in any one of the sequences in Table 1 or 2. In some embodiments, such a hairpin modification is combined with a 5′ end modification as shown for the corresponding sequence in Table 1 or 2. In some embodiments, such a hairpin modification is combined with a 3′ end modification as shown for the corresponding sequence in Table 1 or 2. In some embodiments, such a hairpin modification is combined with 5′ and 3′ end modifications as shown for the corresponding sequence in Table 1 or 2.

[0653] In some embodiments, the gRNA comprises a 3′ end modification, a modification in the hairpin region, a repeat/anti-repeat modification, and a 5′ end modification.

### Exemplary Guide RNAs

[0654] In some embodiments, a gRNA comprising a 5′ end modification and one or more modifications in one or more of: the repeat/anti-repeat region; the hairpin 1 region; and the hairpin 2 region is provided, wherein the one or more modification is at least 99, 98, 97, 96, 95, 94, 93, 92, 91, 90, 85, 80, 75, or 70% identity to the modification pattern shown in the reference sequence identifier in Tables 1-2.

[0655] In some embodiments, the gRNAs described herein comprise any of the sequences shown in Tables 1-2. In some embodiments, the gRNAs described herein consist of any of the sequences shown in Tables 1-2. In some embodiments, the gRNAs described herein consist of any of the sequences shown in Tables 1-2 with any 3′ tail sequences removed. Further, gRNAs are encompassed that comprise the modifications of any of the sequences shown in Table 1 or 2, and identified therein by SEQ ID NO. That is, the nucleotides may be the same or different, but the modification pattern shown may be the same or similar to a modification pattern of a guide sequence of Tables 1-2. A modification pattern includes the relative position and identity of modifications of the gRNA.

[0656] In some embodiments, the modification pattern contains at least 50%, 55%, 60%, 70%, 75%, preferably at least 80%, 85%, 90%, 95%, 96%, 97%, 98%, or 99% of the modifications of any one of the sequences shown in the sequence column of Tables 1-2, or over one or more regions of the sequence. In some embodiments, the modification pattern is at least 50%, 55%, 60%, 70%, 75%, preferably at least 80%, 85%, 90%, 95%, 96%, 97%, 98%, or 99% identical to the modification pattern of any one of the sequences shown in the sequence column of Tables 1-2. In some embodiments, the modification pattern is at least 50%, 55%, 60%, 70%, 75%, preferably at least 80%, 85%, 90%, or 95% identical to the patterns in Tables 1-2 over one or more (e.g., 1, 2, 3, 4, or 5) regions of the sequence shown in Table 3.

[0657] For example, in some embodiments, a gRNA is encompassed wherein the modification pattern is least 50%, 55%, 60%, 70%, 75%, preferably at least 80%, 85%, 90%, or 95% identical to the modification pattern of a sequence over the guide sequence. In some embodiments, a gRNA is encompassed wherein the modification pattern is least 50%, 55%, 60%, 70%, 75%, preferably at least 80%, 85%, 90%, or 95% identical over the repeat/anti-repeat region. In some embodiments, a gRNA is encompassed wherein the modification pattern is least 50%, 55%, 60%, 70%, 75%, preferably at least 80%, 85%, 90%, or 95% identical over the hairpin 1 region. In some embodiments, a gRNA is encompassed wherein the modification pattern is least 50%, 55%, 60%, 70%, 75%, 80%, preferably at least 85%, 90%, 95%, 96%, 97%, 98%, and 99% identical over the hairpin 2 region. In some embodiments, a gRNA is encompassed wherein the modification pattern is least 50%, 55%, 60%, 70%, 80%, or 90%, identical over the 3′ tail. In some embodiments, the modification pattern differs from the modification pattern of a sequence of Tables 1-2, or a region as set forth in Table 3, of such a sequence, at 0, 1, 2, 3, 4, 5, or 6 nucleotides. In some embodiments, the gRNA comprises modifications that differ from the modifications of a sequence of Tables 1-2, at 0, 1, 2, 3, 4, 5, or 6 nucleotides. In some embodiments, the gRNA comprises modifications that differ from modifications of a region set forth in Table 3 of a sequence of Tables 1-2, at 0, 1, 2, 3, 4, 5, or 6 nucleotides.

[0658] In some embodiments, a gRNA is provided comprising any one of the sequences described in SEQ ID NOs: 1-19, 21-42, 301-494, 931-946, 951, and 952. In some embodiments, a gRNA is provided consisting of any one of the sequences described in SEQ ID NOs: 1-19, 21-42, 301-494, 931-946, 951, and 952. In some embodiments, a gRNA is provided compromising any one of the sequences described in SEQ ID NOs: 1-19, 21-42, 301-494, 931-946, 951, and 952 including the modifications shown in Tables 1-2. In some embodiments, a gRNA is provided consisting of any one of the sequences described in SEQ ID NOs: 1-19, 21-42, 301-494, 931-946, 951, and 952 including the modifications shown in Tables 1-2. In some embodiments, a gRNA is provided comprising or consisting of any one of the sequences described in SEQ ID NOs: 1-19, 21-42, 301-494, 931-946, 951, and 952 including the modifications shown in Tables 1-2, wherein the 3′ tail, when present, is deleted.

[0659] In some embodiments, a gRNA is provided comprising any one of the sequences of SEQ ID NOs: 6 or 9 wherein the gRNA further comprises a guide sequence that is complementary to a target sequence, and directs a Cas9 to its target for cleavage. In some embodiments, a gRNA is provided comprising nucleic acids having at least 99, 98, 97, 96, 95, 94, 93, 92, 91, 90, 85, 80, 75, or 70% identity to the nucleic acids of any one of SEQ ID NOs: 6 or 9, wherein the modification pattern is identical to the modification pattern shown in the reference sequence identifier in Tables 1-2.

[0660] FIGS. 25, 37, and 38 show exemplary sgRNAs in possible secondary structures.

[0661] In some embodiments a single guide RNA (sgRNA) comprises:
[0662] a guide sequence comprising:
   [0663] 2′-O-Me modified nucleotides at the first four nucleotides 1-4;
   [0664] PS linkages between nucleotides 1-2, 2-3, and 3-4; and
   [0665] 2′-O-Me modified nucleotides at nucleotides 5, 8, 9, 11, 13, 18, and 22 of the guide sequence;
[0666] a shortened repeat/anti-repeat region, wherein nucleotides 38-48 and 53-63 are deleted relative to SEQ ID NO: 500, comprising:
   [0667] 2′-O-Me modified nucleotides at nucleotides 25, 29, 30, 31, 32, 37, 49-52, 64, 65, 69, 70, and 73;
   [0668] a PS linkage between nucleotides 76-77 between the shortened repeat/anti-repeat region and the shortened hairpin 1 region;
[0669] a shortened hairpin 1 region, wherein nucleotides 86 and 91 are deleted relative to SEQ ID NO: 500, comprising:
   [0670] 2′-O-Me modified nucleotides at nucleotides 80, 81, 83, 84, 85, 87-90, 92-94, and 99;
[0671] 2′-O-Me modified nucleotide at nucleotide 101 between the shortened hairpin 1 region and the shortened hairpin 2 region;
[0672] a shortened hairpin 2 region, wherein nucleotides 112-120 and 127-134 are deleted relative to SEQ ID NO: 500, comprising:
   [0673] 2′-O-Me modified nucleotides at nucleotides 104, 110, 111, 122-125, 142, and 143,
   [0674] PS linkages between nucleotides 141-142 and 142-143, wherein one or both nucleotides 144-145 are optionally deleted relative to SEQ ID NO: 500.

[0675] In some embodiments a single guide RNA (sgRNA) is provided, comprising:
[0676] a guide region comprising:
   [0677] 2′-O-Me modified nucleotides at the first four nucleotides 1-4;
   [0678] PS linkages between nucleotides 1-2, 2-3, and 3-4; and
   [0679] 2′-O-Me modified nucleotides at nucleotides 5, 8, 9, 11, 13, 18, and 22 of the guide region;
[0680] a shortened repeat/anti-repeat region, wherein nucleotides 38-48 and 53-63 are deleted relative to SEQ ID NO: 500, comprising:
   [0681] 2′-O-Me modified nucleotides at nucleotides 25, 29, 30, 31, 32, 37, 49-52, 64, 65, 69, 70, and 73;
   [0682] a PS linkage between nucleotides 76-77 between the shortened repeat/anti-repeat region and the shortened hairpin 1 region;
[0683] a shortened hairpin 1 region, wherein nucleotides 86 and 91 are deleted relative to SEQ ID NO: 500, comprising:
   [0684] 2′-O-Me modified nucleotides at nucleotides 80, 81, 83, 84, 85, 87-90, 92-94, and 99;
[0685] 2′-O-Me modified nucleotide at nucleotide 101 between the shortened hairpin 1 region and the shortened hairpin 2 region;
[0686] a shortened hairpin 2 region, wherein nucleotides 112-120 and 127-134 are deleted relative to SEQ ID NO: 500, comprising:
   [0687] 2′-O-Me modified nucleotides at nucleotides 104, 110, 111, 122-125, 142, and 143;
   [0688] PS linkage between nucleotides 141-142 and 142-143,
   [0689] wherein one or both nucleotides 144-145 are optionally deleted relative to SEQ ID NO: 500.

[0690] In some embodiments a single guide RNA (sgRNA) is provided, comprising:
[0691] a guide region comprising:
   [0692] 2′-O-Me modified nucleotides at the first four nucleotides 1-4;
   [0693] PS linkages between nucleotides 1-2, 2-3, and 3-4; and
   [0694] 2′-O-Me modified nucleotides at nucleotides 5, 8, 9, 11, 13, 18, and 22 of the guide region;
[0695] a shortened repeat/anti-repeat region, wherein nucleotides 38-47 and 54-63 are deleted relative to SEQ ID NO: 500, comprising:
   [0696] 2′-O-Me modified nucleotides at nucleotides 25, 29, 30, 31, 32, 37, 48, 49-52, 64, 65, 69, 70, and 73;
[0697] a PS linkage between nucleotides 76-77 between the shortened repeat/anti-repeat region and the shortened hairpin 1 region;
[0698] a shortened hairpin 1 region, wherein nucleotides 86 and 91 are deleted relative to SEQ ID NO: 500, comprising:
   [0699] 2′-O-Me modified nucleotides at nucleotides 80, 81, 83, 84, 85, 87-90, 92-94, and 99;
[0700] 2′-O-Me modified nucleotide at nucleotide 101 between the shortened hairpin 1 region and the shortened hairpin 2 region;
[0701] a shortened hairpin 2 region, wherein nucleotides 112-120 and 127-134 are deleted relative to SEQ ID NO: 500, comprising:
   [0702] 2′-O-Me modified nucleotides at nucleotides 104, 110, 111, 122-125, 142, and 143;
   [0703] PS linkage between nucleotides 141-142 and 142-143;
   [0704] wherein one or both nucleotides 144-145 are optionally deleted relative to SEQ ID NO: 500.

[0705] In some embodiments a single guide RNA (sgRNA) comprises:
[0706] a guide region comprising:
   [0707] 2′-O-Me modified nucleotides at the first two nucleotides 1-2;
   [0708] PS linkages between nucleotides 1-2; and
   [0709] 2′-O-Me modified nucleotides at nucleotides 10 and 13 of the guide region;
[0710] a shortened repeat/anti-repeat region comprising:
   [0711] nucleotides 38-48 and 53-63 are deleted relative to SEQ ID NO: 500;
   [0712] 2′-O-Me modified nucleotides at nucleotides 25, 29, 30, 31, 32, 37, 49-52, 64, 65, 69, 70, 73;
   [0713] a PS linkage between nucleotides 76-77 between the shortened repeat/anti-repeat region and the shortened hairpin 1 region;
[0714] a shortened hairpin 1 region comprising:
   [0715] nucleotides 86 and 91 are deleted relative to SEQ ID NO: 500;
   [0716] 2′-O-Me modified nucleotides at nucleotides 80, 81, 83, 84, 85, 87-90, 92-94, 99;
   [0717] 2′-O-Me modified nucleotide at nucleotide 101 between the shortened hairpin 1 region and the shortened hairpin 2 region;
[0718] a shortened hairpin 2 region comprising:
   [0719] nucleotides 112-120 and 127-134 are deleted relative to SEQ ID NO: 500;
   [0720] 2′-O-Me modified nucleotides at nucleotides 102-105, 110, 111, 122-125, 135, 136, 138, 139, 141-143,
   [0721] Three PS linkages between nucleotides 140-141, 141-142 and 142-143,
   [0722] wherein the sgRNA does not comprise a 3′ tail.

[0723] In some embodiments a single guide RNA (sgRNA) comprises:
[0724] a guide sequence comprising:
   [0725] 2′-O-Me modified nucleotides at the first four nucleotides 1-4;
   [0726] PS linkages between nucleotides 1-2, 2-3, and 3-4; and
   [0727] 2′-O-Me modified nucleotides at nucleotides 5, 8, 9, 11, 13, 18, and 22 of the guide sequence;
[0728] a shortened repeat/anti-repeat region, wherein nucleotides 38-48 and 53-63 are deleted relative to SEQ ID NO: 500, comprising:
   [0729] 2′-O-Me modified nucleotides at nucleotides 25, 29, 30, 31, 32, 37, 49-52, 64, 65, 69, 70, and 73;
   [0730] a PS linkage between nucleotides 76-77 between the shortened repeat/anti-repeat region and the shortened hairpin 1 region;
[0731] a shortened hairpin 1 region, wherein nucleotides 86 and 91 are deleted relative to SEQ ID NO: 500, comprising:
   [0732] 2′-O-Me modified nucleotides at nucleotides 80, 81, 83, 84, 85, 87-90, 92-94, and 99;
[0733] 2′-O-Me modified nucleotide at nucleotide 101 between the shortened hairpin 1 region and the shortened hairpin 2 region;
[0734] a shortened hairpin 2 region, wherein nucleotides 112-120 and 127-135 are deleted relative to SEQ ID NO: 500, comprising:
   [0735] 2′-O-Me modified nucleotides at nucleotides 104, 110, 111, 122-125, 142, and 143,
   [0736] PS linkages between nucleotides 141-142 and 142-143,
      wherein one or both nucleotides 144-145 are optionally deleted relative to SEQ ID NO: 500.

[0737] In some embodiments a single guide RNA (sgRNA) is provided, comprising:
[0738] a guide region comprising:
   [0739] 2′-O-Me modified nucleotides at the first four nucleotides 1-4;
   [0740] PS linkages between nucleotides 1-2, 2-3, and 3-4; and
   [0741] 2′-O-Me modified nucleotides at nucleotides 5, 8, 9, 11, 13, 18, and 22 of the guide region;
[0742] a shortened repeat/anti-repeat region, wherein nucleotides 38-48 and 53-63 are deleted relative to SEQ ID NO: 500, comprising:
   [0743] 2′-O-Me modified nucleotides at nucleotides 25, 29, 30, 31, 32, 37, 49-52, 64, 65, 69, 70, and 73;
   [0744] a PS linkage between nucleotides 76-77 between the shortened repeat/anti-repeat region and the shortened hairpin 1 region;
[0745] a shortened hairpin 1 region, wherein nucleotides 86 and 91 are deleted relative to SEQ ID NO: 500, comprising:
   [0746] 2′-O-Me modified nucleotides at nucleotides 80, 81, 83, 84, 85, 87-90, 92-94, and 99;
[0747] 2′-O-Me modified nucleotide at nucleotide 101 between the shortened hairpin 1 region and the shortened hairpin 2 region;
[0748] a shortened hairpin 2 region, wherein nucleotides 112-120 and 127-135 are deleted relative to SEQ ID NO: 500, comprising:
   [0749] 2′-O-Me modified nucleotides at nucleotides 104, 110, 111, 122-125, 142, and 143;
   [0750] PS linkage between nucleotides 141-142 and 142-143,
   [0751] wherein one or both nucleotides 144-145 are optionally deleted relative to SEQ ID NO: 500.

[0752] In some embodiments a single guide RNA (sgRNA) is provided, comprising:
[0753] a guide region comprising:
   [0754] 2′-O-Me modified nucleotides at the first four nucleotides 1-4;
   [0755] PS linkages between nucleotides 1-2, 2-3, and 3-4; and
   [0756] 2′-O-Me modified nucleotides at nucleotides 5, 8, 9, 11, 13, 18, and 22 of the guide region;
[0757] a shortened repeat/anti-repeat region, wherein nucleotides 38-47 and 54-63 are deleted relative to SEQ ID NO: 500, comprising:
   [0758] 2′-O-Me modified nucleotides at nucleotides 25, 29, 30, 31, 32, 37, 48, 49-52, 64, 65, 69, 70, and 73;
[0759] a PS linkage between nucleotides 76-77 between the shortened repeat/anti-repeat region and the shortened hairpin 1 region;
[0760] a shortened hairpin 1 region, wherein nucleotides 86 and 91 are deleted relative to SEQ ID NO: 500, comprising:
   [0761] 2′-O-Me modified nucleotides at nucleotides 80, 81, 83, 84, 85, 87-90, 92-94, and 99;
[0762] 2′-O-Me modified nucleotide at nucleotide 101 between the shortened hairpin 1 region and the shortened hairpin 2 region;
[0763] a shortened hairpin 2 region, wherein nucleotides 112-120 and 127-135 are deleted relative to SEQ ID NO: 500, comprising:
   [0764] 2′-O-Me modified nucleotides at nucleotides 104, 110, 111, 122-125, 142, and 143;
   [0765] PS linkage between nucleotides 141-142 and 142-143;
   [0766] wherein one or both nucleotides 144-145 are optionally deleted relative to SEQ ID NO: 500.

[0767] In some embodiments a single guide RNA (sgRNA) comprises:
[0768] a guide region comprising:
   [0769] 2′-O-Me modified nucleotides at the first two nucleotides 1-2;
   [0770] PS linkages between nucleotides 1-2; and
   [0771] 2′-O-Me modified nucleotides at nucleotides 10 and 13 of the guide region;
[0772] a shortened repeat/anti-repeat region comprising:
   [0773] nucleotides 38-48 and 53-63 are deleted relative to SEQ ID NO: 500; 2′-O-Me modified nucleotides at nucleotides 25, 29, 30, 31, 32, 37, 49-52, 64, 65, 69, 70, 73;
   [0774] a PS linkage between nucleotides 76-77 between the shortened repeat/anti-repeat region and the shortened hairpin 1 region;
[0775] a shortened hairpin 1 region comprising:
   [0776] nucleotides 86 and 91 are deleted relative to SEQ ID NO: 500;
   [0777] 2′-O-Me modified nucleotides at nucleotides 80, 81, 83, 84, 85, 87-90, 92-94, 99;
   [0778] 2′-O-Me modified nucleotide at nucleotide 101 between the shortened hairpin 1 region and the shortened hairpin 2 region;
[0779] a shortened hairpin 2 region comprising:
   [0780] nucleotides 112-120 and 127-135 are deleted relative to SEQ ID NO: 500;
   [0781] 2′-O-Me modified nucleotides at nucleotides 102-105, 110, 111, 122-125, 135, 136, 138, 139, 141-143,
   [0782] Three PS linkages between nucleotides 140-141, 141-142 and 142-143,
   [0783] wherein the sgRNA does not comprise a 3′ tail.

[0784] In some embodiments a single guide RNA (sgRNA) comprises:
[0785] a guide sequence comprising:
   [0786] 2′-O-Me modified nucleotides at the first four nucleotides 1-4;
   [0787] PS linkages between nucleotides 1-2, 2-3, and 3-4; and
   [0788] 2′-O-Me modified nucleotides at nucleotides 5, 8, 9, 11, 13, 18, and 22 of the guide sequence;
[0789] a shortened repeat/anti-repeat region, wherein nucleotides 38, 41-48 and 53-60, and 63 are deleted relative to SEQ ID NO: 500, comprising:
   [0790] 2′-O-Me modified nucleotides at nucleotides 25, 29, 30, 31, 32, 37, 39-40, 49-52, 61-62, 64, 65, 69, 70, and 73;
   [0791] a PS linkage between nucleotides 76-77 between the shortened repeat/anti-repeat region and the shortened hairpin 1 region;
[0792] a shortened hairpin 1 region, wherein nucleotides 86 and 91 are deleted relative to SEQ ID NO: 500, comprising:
   [0793] 2′-O-Me modified nucleotides at nucleotides 80, 81, 83, 84, 85, 87-90, 92-94, and 99;
[0794] 2′-O-Me modified nucleotide at nucleotide 101 between the shortened hairpin 1 region and the shortened hairpin 2 region;
[0795] a shortened hairpin 2 region, wherein nucleotides 112-120 and 127-135 are deleted relative to SEQ ID NO: 500, comprising:
   [0796] 2′-O-Me modified nucleotides at nucleotides 104, 110, 111, 122-125, 142, and 143,
   [0797] PS linkages between nucleotides 141-142 and 142-143,
      wherein one or both nucleotides 144-145 are optionally deleted relative to SEQ ID NO: 500.

[0798] In some embodiments a single guide RNA (sgRNA) comprises:
[0799] a guide sequence comprising:
   [0800] 2′-O-Me modified nucleotides at the first four nucleotides 1-4;
   [0801] PS linkages between nucleotides 1-2, 2-3, and 3-4; and
   [0802] 2′-O-Me modified nucleotides at nucleotides 5, 8, 9, 11, 13, 18, and 22 of the guide sequence;
[0803] a shortened repeat/anti-repeat region, wherein nucleotides 38-48 and 53-63 are deleted relative to SEQ ID NO: 500, comprising:
   [0804] 2′-O-Me modified nucleotides at nucleotides 25, 29, 30, 31, 32, 37, 49-52, 64, 65, 69, 70, and 73;
[0805] a shortened hairpin 1 region, wherein nucleotides 86 and 91 are deleted relative to SEQ ID NO: 500, comprising:
   [0806] 2′-O-Me modified nucleotides at nucleotides 80, 81, 83, 84, 85, 87-90, 92-94, and 99;
[0807] 2′-O-Me modified nucleotide at nucleotide 101 between the shortened hairpin 1 region and the shortened hairpin 2 region;
[0808] a shortened hairpin 2 region, wherein nucleotides 112-120 and 127-135 are deleted relative to SEQ ID NO: 500, comprising:
   [0809] 2′-O-Me modified nucleotides at nucleotides 104, 110, 111, 122-125, 142, and 143,
   [0810] PS linkages between nucleotides 141-142 and 142-143,
      wherein one or both nucleotides 144-145 are optionally deleted relative to SEQ ID NO: 500.

[0811] In some embodiments a single guide RNA (sgRNA) comprises:
[0812] a guide sequence comprising:
   [0813] 2′-O-Me modified nucleotides at the first four nucleotides 1-4;
   [0814] PS linkages between nucleotides 1-2, 2-3, and 3-4; and
   [0815] 2′-O-Me modified nucleotides at nucleotides 5, 8, 9, 11, 13, 18, and 22 of the guide sequence;
[0816] a shortened repeat/anti-repeat region, wherein nucleotides 38-48 and 53-63 are deleted relative to SEQ ID NO: 500, comprising:
   [0817] 2′-O-Me modified nucleotides at nucleotides 25, 29, 30, 31, 32, 37, 49-52, 64, 65, 69, 70, and 73;
   [0818] a PS linkage between nucleotides 76-77 between the shortened repeat/anti-repeat region and the shortened hairpin 1 region;
[0819] a shortened hairpin 1 region, wherein nucleotides 86 and 91 are deleted relative to SEQ ID NO: 500, comprising:
   [0820] 2′-O-Me modified nucleotides at nucleotides 80, 81, 83, 84, 85, 87-90, 92-94, and 99;
[0821] 2′-O-Me modified nucleotide at nucleotide 101 between the shortened hairpin 1 region and the shortened hairpin 2 region;
[0822] a shortened hairpin 2 region, wherein nucleotides 112-120 and 127-135 are deleted relative to SEQ ID NO: 500, comprising:
   [0823] 2′-O-Me modified nucleotides at nucleotides 104, 106-109, 110, 111, 122-125, 142, and 143,
   [0824] PS linkages between nucleotides 141-142 and 142-143,
      wherein one or both nucleotides 144-145 are optionally deleted relative to SEQ ID NO: 500.

[0825] In some embodiments a single guide RNA (sgRNA) comprises:
[0826] a guide sequence comprising:
   [0827] 2′-O-Me modified nucleotides at the first four nucleotides 1-4;
   [0828] PS linkages between nucleotides 1-2, 2-3, and 3-4; and
   [0829] 2′-O-Me modified nucleotides at nucleotides 5, 8, 9, 11, 13, 18, and 22 of the guide sequence;
[0830] a shortened repeat/anti-repeat region, wherein nucleotides 38-48 and 53-63 are deleted relative to SEQ ID NO: 500, comprising:
   [0831] 2′-O-Me modified nucleotides at nucleotides 25, 29, 30, 31, 32, 37, 49-52, 64, 65, 69, 70, and 73;
[0832] a shortened hairpin 1 region, wherein nucleotides 86 and 91 are deleted relative to SEQ ID NO: 500, comprising:
   [0833] 2′-O-Me modified nucleotides at nucleotides 80, 81, 83, 84, 85, 87-90, 92-94, and 99;
[0834] 2′-O-Me modified nucleotide at nucleotide 101 between the shortened hairpin 1 region and the shortened hairpin 2 region;
[0835] a shortened hairpin 2 region, wherein nucleotides 112-120 and 127-135 are deleted relative to SEQ ID NO: 500, comprising:
   [0836] 2′-O-Me modified nucleotides at nucleotides 104, 106-109, 110, 111, 122-125, 142, and 143,
   [0837] PS linkages between nucleotides 141-142 and 142-143,
      wherein one or both nucleotides 144-145 are optionally deleted relative to SEQ ID NO: 500.

[0838] In some embodiments a single guide RNA (sgRNA) comprises:
[0839] a guide sequence comprising:
   [0840] 2′-O-Me modified nucleotides at the first four nucleotides 1-4;
   [0841] PS linkages between nucleotides 1-2, 2-3, and 3-4; and
   [0842] 2′-O-Me modified nucleotides at nucleotides 5, 8, 9, 11, 13, 18, and 22 of the guide sequence;
[0843] a shortened repeat/anti-repeat region, wherein nucleotides 38, 41-48 and 53-60, and 63 are deleted relative to SEQ ID NO: 500, comprising:
   [0844] 2′-O-Me modified nucleotides at nucleotides 25, 29, 30, 31, 32, 37, 39-40, 49-52, 61-62, 64, 65, 69, 70, and 73;
[0845] a shortened hairpin 1 region, wherein nucleotides 86 and 91 are deleted relative to SEQ ID NO: 500, comprising:
   [0846] 2′-O-Me modified nucleotides at nucleotides 80, 81, 83, 84, 85, 87-90, 92-94, and 99;
[0847] 2′-O-Me modified nucleotide at nucleotide 101 between the shortened hairpin 1 region and the shortened hairpin 2 region;
[0848] a shortened hairpin 2 region, wherein nucleotides 112-120 and 127-135 are deleted relative to SEQ ID NO: 500, comprising:
   [0849] 2′-O-Me modified nucleotides at nucleotides 104, 110, 111, 122-125, 142, and 143,
   [0850] PS linkages between nucleotides 141-142 and 142-143,
      wherein one or both nucleotides 144-145 are optionally deleted relative to SEQ ID NO: 500.

[0851] In some embodiments a single guide RNA (sgRNA) comprises:
[0852] a guide sequence comprising:
   [0853] 2′-O-Me modified nucleotides at the first four nucleotides 1-4;
   [0854] PS linkages between nucleotides 1-2, 2-3, and 3-4; and
   [0855] 2′-O-Me modified nucleotides at nucleotides 5, 8, 9, 11, 13, 18, and 22 of the guide sequence;
[0856] a shortened repeat/anti-repeat region, wherein nucleotides 38, 41-48 and 53-60, and 63 are deleted relative to SEQ ID NO: 500, comprising:
   [0857] 2′-O-Me modified nucleotides at nucleotides 25, 29, 30, 31, 32, 37, 39-40, 49-52, 61-62, 64, 65, 69, 70, and 73;
   [0858] a PS linkage between nucleotides 76-77 between the shortened repeat/anti-repeat region and the shortened hairpin 1 region;
[0859] a shortened hairpin 1 region, wherein nucleotides 86 and 91 are deleted relative to SEQ ID NO: 500, comprising:
   [0860] 2′-O-Me modified nucleotides at nucleotides 80, 81, 83, 84, 85, 87-90, 92-94, and 99;
[0861] 2′-O-Me modified nucleotide at nucleotide 101 between the shortened hairpin 1 region and the shortened hairpin 2 region;
[0862] a shortened hairpin 2 region, wherein nucleotides 112-120 and 127-135 are deleted relative to SEQ ID NO: 500, comprising:
   [0863] 2′-O-Me modified nucleotides at nucleotides 104, 106-109, 110, 111, 122-125, 142, and 143,
   [0864] PS linkages between nucleotides 141-142 and 142-143,
      wherein one or both nucleotides 144-145 are optionally deleted relative to SEQ ID NO: 500.

[0865] In some embodiments a single guide RNA (sgRNA) comprises:
[0866] a guide sequence comprising:
   [0867] 2′-O-Me modified nucleotides at the first four nucleotides 1-4;
   [0868] PS linkages between nucleotides 1-2, 2-3, and 3-4; and
   [0869] 2′-O-Me modified nucleotides at nucleotides 5, 8, 9, 11, 13, 18, and 22 of the guide sequence;
[0870] a shortened repeat/anti-repeat region, wherein nucleotides 38, 41-48 and 53-60, and 63 are deleted relative to SEQ ID NO: 500, comprising:
   [0871] 2′-O-Me modified nucleotides at nucleotides 25, 29, 30, 31, 32, 37, 39-40, 49-52, 61-62, 64, 65, 69, 70, and 73;
[0872] a shortened hairpin 1 region, wherein nucleotides 86 and 91 are deleted relative to SEQ ID NO: 500, comprising:
   [0873] 2′-O-Me modified nucleotides at nucleotides 80, 81, 83, 84, 85, 87-90, 92-94, and 99;
[0874] 2′-O-Me modified nucleotide at nucleotide 101 between the shortened hairpin 1 region and the shortened hairpin 2 region;
[0875] a shortened hairpin 2 region, wherein nucleotides 112-120 and 127-135 are deleted relative to SEQ ID NO: 500, comprising:
   [0876] 2′-O-Me modified nucleotides at nucleotides 104, 106-109, 110, 111, 122-125, 142, and 143,
   [0877] PS linkages between nucleotides 141-142 and 142-143,
      wherein one or both nucleotides 144-145 are optionally deleted relative to SEQ ID NO: 500.

### Compositions and Kits

[0878] Compositions comprising any of the gRNAs described herein and a carrier, excipient, diluent, or the like are encompassed. In some instances, the excipient or diluent is inert. In some instances, the excipient or diluent is not inert. In certain embodiments, the carrier, excipient, or diluent is non-pyrogenic. In certain embodiments, the carrier, excipient, or diluent is sterile. In some embodiments, a pharmaceutical formulation is provided comprising any of the gRNAs described herein and a pharmaceutically acceptable carrier, excipient, diluent, or the like. In some embodiments, the pharmaceutical formulation further comprises an LNP. In some embodiments, the pharmaceutical formulation further comprises a Cas9 protein or an mRNA encoding a Cas9 protein. In some embodiments, the pharmaceutical formulation comprises any one or more of the gRNAs, an LNP, and a Cas protein or mRNA encoding a Cas protein. In some embodiments, the gRNA is an sgRNA. In some embodiments, the Cas protein is a monomeric Cas protein, e.g., a Cas9 protein. In some embodiments, the Cas protein is an Nine Cas protein. In some embodiments, the Cas protein includes multiple subunits.

[0879] Also provided are kits comprising one or more gRNAs, compositions, or pharmaceutical formulations described herein. In some embodiments, a kit further comprises one or more of a solvent, solution, buffer, each separate from the composition or pharmaceutical formulation, instructions, or desiccant.

Compositions Comprising an RNA-Guided DNA Binding Agent or mRNA Encoding RNA-Guided DNA Binding Agent

[0880] In some embodiments, compositions or pharmaceutical formulations are provided comprising at least one gRNA, preferably a sgRNA, described herein and an RNA-guided DNA binding agent or a nucleic acid (e.g., an mRNA) encoding an RNA-guided DNA binding agent. In some embodiments, the RNA-guided DNA binding agent is a Cas protein. In some embodiments, the gRNA together with a Cas protein or nucleic acid (e.g., mRNA) encoding Cas protein is called a Cas RNP. In some embodiments, the RNA-guided DNA binding agent is one that functions with the gRNA to direct an RNA-guided DNA binding agent to a target nucleic acid sequence. In some embodiments, the RNA-guided DNA binding agent is a Cas protein from the Type-II CRISPR/Cas system. In some embodiments, the Cas protein is Cas9. In some embodiments, the Cas9 protein is a wild type Cas9. In some embodiments, the Cas9 protein is derived from the Neisseria meningitidis Cas9 (NmeCas9). In some embodiments, compositions are provided comprising at least one gRNA and a nuclease or an mRNA encoding an NmeCas9. In some embodiments, compositions are provided comprising at least one gRNA and a nuclease or an mRNA encoding an NmeCas9. In some embodiments, the Cas induces a double strand break in target DNA. Equivalents of NmeCas9 and its homologs and variants, other Cas proteins disclosed herein are encompassed by the embodiments described herein.

[0881] RNA-guided DNA binding agents, including Cas9, encompass modified and variants thereof. Modified versions having one catalytic domain, either RuvC or HNH, that is inactive are termed “nickases.” Nickases cut only one strand on the target DNA, thus creating a single-strand break. A single-strand break may also be known as a “nick.” In some embodiments, the compositions and methods comprise nickases. In some embodiments, the compositions and methods comprise a nickase RNA-guided DNA binding agent, such as a nickase Cas, e.g., a nickase Cas9, that induces a nick rather than a double strand break in the target DNA.

[0882] In some embodiments, the nuclease, e.g., the RNA-guided DNA binding agent, may be modified to contain only one functional nuclease domain. For example, the RNA-guided DNA binding agent may be modified such that one of the nuclease domains is mutated or fully or partially deleted to reduce its nucleic acid cleavage activity. In some embodiments, a nickase Cas is used having a RuvC domain with reduced activity. In some embodiments, a nickase Cas is used having an inactive RuvC domain. In some embodiments, a nickase Cas is used having an HNH domain with reduced activity. In some embodiments, a nickase Cas is used having an inactive HNH domain.

[0883] In some embodiments, a conserved amino acid within an RNA-guided DNA binding agent nuclease domain is substituted to reduce or alter nuclease activity. In some embodiments, a Cas protein may comprise an amino acid substitution in the RuvC or RuvC-like nuclease domain. Exemplary amino acid substitutions in the RuvC or RuvC-like nuclease domain include H588A (based on the N. meningitidis Cas9 protein). In some embodiments, the Cas protein may comprise an amino acid substitution in the HNH or HNH-like nuclease domain. Exemplary amino acid substitutions in the HNH or HNH-like nuclease domain include D16A (based on the NmeCas9 protein).

[0884] In some embodiments, the RNP complex described herein comprises a nickase or an mRNA encoding a nickase and a pair of gRNAs (one or both of which may be sgRNAs) that are complementary to the sense and antisense strands of the target sequence, respectively. In this embodiment, the gRNAs (e.g., sgRNAs) direct the nickase to a target sequence and introduce a double stranded break (DSB) by generating a nick on opposite strands of the target sequence (i.e., double nicking). In some embodiments, use of double nicking may improve specificity and reduce off-target effects. In some embodiments, a nickase RNA-guided DNA binding agent is used together with two separate gRNAs (e.g., sgRNAs) that are selected to be in close proximity to produce a double nick in the target DNA.

[0885] In some embodiments, chimeric Cas proteins are used, where one domain or region of the protein is replaced by a portion of a different protein. In some embodiments, a Cas nuclease domain may be replaced with a domain from a different nuclease such as Fok1. In some embodiments, a Cas protein may be a modified nuclease.

[0886] In some embodiments, the nuclease, e.g., the RNA-guided DNA binding agent, may be modified to induce a point mutation or base change, e.g., a deamination.

[0887] In some embodiments, the Cas protein comprises a fusion protein comprising a Cas nuclease (e.g., Cas9), which is a nickase or is catalytically inactive, linked to a heterologous functional domain. In some embodiments, the Cas protein comprises a fusion protein comprising a catalytically inactive Cas nuclease (e.g., Cas9) linked to a heterologous functional domain (see, e.g., WO2014152432). In some embodiments, the catalytically inactive Cas9 is a catalytically inactive N. meningitidis Cas9. In some embodiments, the catalytically inactive Cas comprises mutations that inactivate the Cas. In some embodiments, the heterologous functional domain is a domain that modifies gene expression, histones, or DNA. In some embodiments, the heterologous functional domain is a transcriptional activation domain or a transcriptional repressor domain. In some embodiments, the nuclease is a catalytically inactive Cas nuclease, such as dCas9.

[0888] In some embodiments, the heterologous functional domain is a deaminase, such as a cytidine deaminase or an adenine deaminase. In certain embodiments, the heterologous functional domain is a C to T base converter (cytidine deaminase), such as an apolipoprotein B mRNA editing enzyme (APOBEC) deaminase. A heterologous functional domain such as a deaminase may be part of a fusion protein with a Cas nuclease having nickase activity or a Cas nuclease that is catalytically inactive.

[0889] In some embodiments, the target sequence may be adjacent to a PAM. In some embodiments, the PAM may be adjacent to or within 1, 2, 3, or 4, nucleotides of the 3′ end of the target sequence. The length and the sequence of the PAM may depend on the Cas protein used. For example, the PAM may be selected from a consensus or a particular PAM sequence for a specific Nine Cas9 protein or Nme Cas9 ortholog (Edraki et al., 2019). In some embodiments, the Nine Cas9 PAM may comprise 2, 3, 4, 5, 6, 7, 8, 9, or 10 nucleotides in length. Non-limiting exemplary PAM sequences include NCC, N4GAYW, N4GYTT, N4GTCT, NNNNCC(a), NNNNCAAA (wherein N is defined as any nucleotide, W is defined as either A or T, and R is defined as either A or G; and (a) is a preferred, but not required, A after the second C)). In some embodiments, the PAM sequence may be NCC.

[0890] In some embodiments, the heterologous functional domain may facilitate transport of the RNA-guided DNA-binding agent into the nucleus of a cell. For example, the heterologous functional domain may be a nuclear localization signal (NLS). In some embodiments, the RNA-guided DNA-binding agent may be fused with 1-10 NLS(s). In some embodiments, the RNA-guided DNA-binding agent may be fused with 1-5 NLS(s). In some embodiments, the RNA-guided DNA-binding agent may be fused with one NLS. Where one NLS is used, the NLS is preferably fused at the N-terminus of the RNA-guided DNA-binding agent sequence. It may also be inserted within the RNA-guided DNA binding agent sequence. In other embodiments, the RNA-guided DNA-binding agent may be fused with more than one NLS. In some embodiments, the RNA-guided DNA-binding agent may be fused with 2, 3, 4, or 5 NLSs. In some embodiments, the RNA-guided DNA-binding agent may be fused with two NLSs. In some embodiments, the NLSs may be fused to the N-terminus of the RNA-guided DNA binding agent sequence. In some embodiments, the NLSs may be fused to only the N-terminus of the RNA-guided DNA binding agent sequence. In some embodiments, the RNA-guided DNA binding agent may have no NLS inserted within the RNA-guided DNA-binding agent sequence. In certain embodiments, may have no NLS C-terminal to the RNA-guided DNA-binding agent sequence.

[0891] In some embodiments, the RNA-guided DNA-binding agent may be fused with two NLSs. In certain circumstances, the two NLSs may be the same (e.g., two SV40 NLSs) or different. In some embodiments, the RNA-guided DNA-binding agent is fused to two NLS sequences (e.g., SV40) at the amino terminus. In some embodiments, the RNA-guided DNA-binding agent may be fused with two NLSs, one at the N-terminus and one at the C-terminus. In some embodiments, the RNA-guided DNA-binding agent may be fused with 3 NLSs. In some embodiments, the RNA-guided DNA-binding agent is not fused with an NLS at the C-terminus. In some embodiments, the RNA-guided DNA-binding agent does not include an NLS inserted within the RNA-guided DNA-binding agent sequence. NLS may be fused at the C-terminus of the RNA-guided DNA-binding agent. One or more linkers are optionally included at the fusion site.

[0892] In some embodiments, the NLS may be a monopartite sequence, such as, e.g., the SV40 NLS, PKKKRKV (SEQ ID NO: 669) or PKKKRRV (SEQ ID NO: 670). In some embodiments, the NLS may be a bipartite sequence, such as the NLS of nucleoplasmin, KRPAATKKAGQAKKKK (SEQ ID NO: 682). In some embodiments, the NLS sequence may comprise LAAKRSRTT (SEQ ID NO: 671), QAAKRSRTT (SEQ ID NO: 672), PAPAKRERTT (SEQ ID NO: 673), QAAKRPRTT (SEQ ID NO: 674), RAAKRPRTT (SEQ ID NO: 675), AAAKRSWSMAA (SEQ ID NO: 676), AAAKRVWSMAF (SEQ ID NO: 677), AAAKRSWSMAF (SEQ ID NO: 678), AAAKRKYFAA (SEQ ID NO: 679), RAAKRKAFAA (SEQ ID NO: 680), or RAAKRKYFAV (SEQ ID NO: 681). The NLS may be a snurportin-1 importin-β (IBB domain, e.g. an SPN1-impp sequence. See Huber et al., 2002, J. Cell Bio., 156, 467-479. In a specific embodiment, a single PKKKRKV (SEQ ID NO: 669). In some embodiments, the first and second NLS are independently selected from an SV40 NLS, a nucleoplasmin NLS, a bipartite NLS, a c-myc like NLS, and an NLS comprising the sequence KTRAD. In certain embodiments, the first and second NLSs may be the same (e.g., two SV40 NLSs). In certain embodiments, the first and second NLSs may be different.

[0893] In some embodiments, the first NLS is a SV40NLS and the second NLS is a nucleoplasmin NLS.

[0894] In some embodiments, the SV40 NLS comprises a sequence of SEQ ID NO: 683 or 684. In some embodiments, the nucleoplasmin NLS comprises a sequence of SEQ ID NO: 682. In some embodiments, the bipartite NLS comprises a sequence of SEQ ID NO: 685. In some embodiments, the c-myc like NLS comprises a sequence of SEQ ID NO: 686.

[0895] In some embodiments, the RNA-guided DNA binding agent comprises an amino acid sequence with at least 90%, 93%, 95%, 96%, 97%, 98%, 99%, 99.5%, or 100% identity to any one of SEQ ID NOs: 600-603, 605, 607-620, or 707-712 (as shown in Table 4A).

[0896] In some embodiments, a polynucleotide encoding the RNA-guided DNA binding agent comprises a nucleotide sequence with at least 90%, 93%, 95%, 96%, 97%, 98%, 99%, 99.5%, or 100% identity to any one of SEQ ID NOs: 621-623, 626-643, 645, 647-668, 701-706, and 713-718 (NmeCas9 mRNA and ORFs as shown in Table 4A).

[0897] In some embodiments, the mRNA encoding the RNA-guided DNA binding agent comprises an open reading frame (ORF) comprising a sequence with at least 90%, 93%, 95%, 96%, 97%, 98%, or 99%, or with 100% identity to any one of SEQ ID NOs: 621-623, 626-639, and 713-718 as shown in Table 4A.

### Methods of Use

[0898] In some embodiments, any one or more of the gRNAs (e.g., sgRNAs,), compositions, or pharmaceutical formulations described herein is for use in preparing a medicament for treating or preventing a disease or disorder in a subject.

[0899] In some embodiments, the invention comprises a method of treating or preventing a disease or disorder in subject comprising administering any one or more of the gRNAs (e.g., sgRNAs), compositions, or pharmaceutical formulations described herein.

[0900] In some embodiments, the invention comprises a method or use of modifying a target DNA comprising, administering or delivering any one or more of the gRNAs (e.g., sgRNAs), compositions, or pharmaceutical formulations described herein.

[0901] In some embodiments, the invention comprises a method or use for modulation of a target gene comprising, administering or delivering any one or more of the gRNAs (e.g., sgRNAs), compositions, or pharmaceutical formulations described herein. In some embodiments, the modulation is editing of the target gene. In some embodiments, the modulation is a change in expression of the protein encoded by the target gene.

[0902] As used herein, a “gene editing” or “genetic modification” is a change at the DNA level, e.g., induced by a gRNA/Cas complex. A gene editing or genetic modification may comprise an insertion, deletion, or substitution (base substitution, e.g., C-to-T, or point mutation), typically within a defined sequence or genomic locus. A genetic modification changes the nucleic acid sequence of the DNA. A genetic modification may be at a single nucleotide position. A genetic modification may be at multiple nucleotides, e.g., 2, 3, 4, 5 or more nucleotides, typically in close proximity to each other, e.g., contiguous nucleotides.

[0903] In some embodiments, the method or use results in gene editing. In some embodiments, the method or use results in a double-stranded break within the target gene. In some embodiments, the method or use results in formation of indel mutations during non-homologous end joining of the DSB. In some embodiments, the method or use results in an insertion or deletion of nucleotides in a target gene. In some embodiments, the insertion or deletion of nucleotides in a target gene leads to a frameshift mutation or premature stop codon that results in a non-functional protein. In some embodiments, the insertion or deletion of nucleotides in a target gene leads to a knockdown or elimination of target gene expression. In some embodiments, the method or use comprises homology directed repair of a DSB. In some embodiments, the method or use further comprises delivering to the cell a template, wherein at least a part of the template incorporates into a target DNA at or near a double strand break site induced by the nuclease. In some embodiments, the method or use results in a single strand break within the target gene. In some embodiments, the method or use results in a base change, e.g., by deamination, within the target gene. The gene editing typically occurs within or adjacent to the portion of the target gene with which the spacer sequence forms a duplex.

[0904] In some embodiments, the method or use results in gene modulation. In some embodiments, the gene modulation is an increase or decrease in gene expression, a change in methylation state of DNA, or modification of a histone subunit. In some embodiments, the method or use results in increased or decreased expression of the protein encoded by the target gene.

[0905] The efficacy of gRNAs can be tested in vitro and in vivo. In some embodiments, the invention comprises one or more of the gRNAs, compositions, or pharmaceutical formulations described herein, wherein the gRNA results in gene modulation when provided to a cell together with a Cas nuclease, e.g., Cas9 or mRNA encoding Cas9. In some embodiments, the efficacy of gRNA can be measured in vitro or in vivo.

[0906] In some embodiments, the activity of a Cas RNP comprising a gRNA is compared to the activity of a Cas RNP comprising an unmodified sgRNA or a reference sgRNA lacking modifications present in the sgRNA, such as one or more internal linkers, or shortened regions. In some embodiments, the sgRNA do not include an internal linker.

[0907] In some embodiments, the efficiency of a gRNA in increasing or decreasing target protein expression is determined by measuring the amount of target protein.

[0908] In some embodiments, the efficiency of editing with specific gRNAs is determined by the editing present at the target location in the genome following delivery of a Cas nuclease and the gRNA. In some embodiments, the efficiency of editing with specific gRNAs is measured by next-generation sequencing (NGS). In some embodiments, the editing percentage of the target region of interest is determined. In some embodiments, the total number of sequence reads with sequence alterations, e.g., insertions or deletions (indels), or base changes with no insertion or deletion, of nucleotides into the target region of interest over the total number of sequence reads is measured following delivery of a gRNA and a Cas nuclease.

[0909] In some embodiments, the efficiency of editing with specific gRNAs is measured by the presence of sequence alterations, e.g., insertions or deletions, or base substitution, or point mutation of nucleotides introduced by successful gene editing. In some embodiments, activity of a Cas nuclease and gRNAs is tested in biochemical assays. In some embodiments, activity of a Cas nuclease and gRNAs is tested in a cell-free cleavage assay. In some embodiments, activity of a Cas nuclease and gRNAs is tested in Neuro2A cells. In some embodiments, activity of a Cas nuclease and gRNAs is tested in primary cells, e.g., primary hepatocytes.

[0910] In some embodiments, the activity of modified gRNAs is measured after in vivo dosing of LNPs comprising modified gRNAs and Cas protein or mRNA encoding Cas protein.

[0911] In some embodiments, in vivo efficacy of a gRNA or composition provided herein is determined by editing efficacy measured in DNA extracted from tissue (e.g., liver tissue) after administration of gRNA and a Cas nuclease.

[0912] In some embodiments, activation of the subject's immune response is measured by serum concentrations of cytokine(s) following in vivo dosing of sgRNA together with Cas nuclease mRNA or protein (e.g., formulated in an LNP). In some embodiments, the cytokine is interferon-alpha (IFN-alpha), interleukin 6 (IL-6), monocyte chemotactic protein 1 (MCP-1), or tumor necrosis factor alpha (TNF-alpha).

[0913] In some embodiments, administration of Cas RNP or Cas nuclease mRNA together with the modified gRNA (e.g., sgRNA) produces lower serum concentration(s) of immune cytokines compared to administration of unmodified sgRNA. In some embodiments, the invention comprises methods comprising administering any one of the gRNAs disclosed herein to a subject, wherein the gRNA elicits a lower concentration of immune cytokines in the subject's serum as compared to a control gRNA that is not similarly modified.

### Delivery of Guide RNA

[0914] In some embodiments, the gRNA compositions, compositions, or pharmaceutical formulations disclosed herein, alone or encoded on one or more vectors, are formulated in or administered via a lipid nanoparticle; see e.g., WO2017/173054, the contents of which are hereby incorporated by reference in their entirety.

### Lipids; Formulation; Delivery

[0915] Disclosed herein are various embodiments using lipid nucleic acid assembly compositions comprising nucleic acids(s), or composition(s) described herein. In some embodiments, the lipid nucleic acid assembly composition comprises a gRNA described herein, e.g., a gRNA comprising a guide region and a conserved region, the conserved region comprising one or more of: (a) a shortened repeat/anti-repeat region, wherein the shortened repeat/anti-repeat region lacks 2-24 nucleotides, wherein (i) one or more of nucleotides 37-48 and 53-64 is deleted and optionally one or more of nucleotides 37-64 is substituted relative to SEQ ID NO: 500; and (ii) nucleotide 36 is linked to nucleotide 65 by at least 2 nucleotides; or (b) a shortened hairpin 1 region, wherein the shortened hairpin 1 lacks 2-10, optionally 2-8 nucleotides, wherein (i) one or more of nucleotides 82-86 and 91-95 is deleted and optionally one or more of positions 82-96 is substituted relative to SEQ ID NO: 500; and (ii) nucleotide 81 is linked to nucleotide 96 by at least 4 nucleotides; or (c) a shortened hairpin 2 region, wherein the shortened hairpin 2 lacks 2-18, optionally 2-16 nucleotides, wherein (i) one or more of nucleotides 113-121 and 126-134 is deleted and optionally one or more of nucleotides 113-134 is substituted relative to SEQ ID NO: 500; and (ii) nucleotide 112 is linked to nucleotide 135 by at least 4 nucleotides; wherein one or both nucleotides 144-145 are optionally deleted relative to SEQ ID NO: 500; wherein at least 10 nucleotides are modified nucleotides.

[0916] As used herein, a “lipid nucleic acid assembly composition” refers to lipid-based delivery compositions, including lipid nanoparticles (LNPs) and lipoplexes. LNP refers to lipid nanoparticles <100 nM. LNPs are formed by precise mixing a lipid component (e.g., in ethanol) with an aqueous nucleic acid component and LNPs are uniform in size. Lipoplexes are particles formed by bulk mixing the lipid and nucleic acid components and are between about 100 nm and 1 micron in size. In certain embodiments the lipid nucleic acid assemblies are LNPs. As used herein, a “lipid nucleic acid assembly” comprises a plurality of (i.e., more than one) lipid molecules physically associated with each other by intermolecular forces. A lipid nucleic acid assembly may comprise a bioavailable lipid having a pKa value of <7.5 or <7. The lipid nucleic acid assemblies are formed by mixing an aqueous nucleic acid-containing solution with an organic solvent-based lipid solution, e.g., 100% ethanol. Suitable solutions or solvents include or may contain: water, PBS, Tris buffer, NaCl, citrate buffer, ethanol, chloroform, diethyl ether, cyclohexane, tetrahydrofuran, methanol, isopropanol. A pharmaceutically acceptable buffer may optionally be comprised in a pharmaceutical formulation comprising the lipid nucleic acid assemblies, e.g., for an ex vivo therapy. In some embodiments, the aqueous solution comprises a gRNA described herein. In some embodiments, the aqueous solution further comprises an mRNA encoding an RNA-guided DNA binding agent, such as Cas9.

[0917] As used herein, lipid nanoparticle (LNP) refers to a particle that comprises a plurality of (i.e., more than one) lipid molecules physically associated with each other by intermolecular forces. The LNPs may be, e.g., microspheres (including unilamellar and multilamellar vesicles, e.g., “liposomes”—lamellar phase lipid bilayers that, in some embodiments, are substantially spherical—and, in more particular embodiments, can comprise an aqueous core, e.g., comprising a substantial portion of RNA molecules), a dispersed phase in an emulsion, micelles, or an internal phase in a suspension. Emulsions, micelles, and suspensions may be suitable compositions for local and/or topical delivery. See also, e.g., WO2017173054A1, the contents of which are hereby incorporated by reference in their entirety. Any LNP known to those of skill in the art to be capable of delivering nucleotides to subjects may be utilized with the guide RNAs and the nucleic acid encoding an RNA-guided nickase and the nucleic acid encoding a cytidine deaminase described herein.

[0918] In some embodiments, the aqueous solution comprises a gRNA described herein and optionally further comprises an mRNA encoding an RNA-guided DNA binding agent, such as Cas9. A pharmaceutical formulation comprising the lipid nucleic acid assembly composition may optionally comprise a pharmaceutically acceptable buffer.

[0919] In some embodiments, the lipid nucleic acid assembly compositions include an “amine lipid” (sometimes herein or elsewhere described as an “ionizable lipid” or a “biodegradable lipid”), together with an optional “helper lipid”, a “neutral lipid”, and a stealth lipid such as a PEG lipid. In some embodiments, the amine lipids or ionizable lipids are cationic depending on the pH.

### Amine Lipids

[0920] In some embodiments, lipid nucleic acid assembly compositions comprise an “amine lipid”, which is, for example an ionizable lipid such as Lipid A or its equivalents, including acetal analogs of Lipid A.

[0921] In some embodiments, the amine lipid is Lipid A, which is (9Z,12Z)-3-((4,4-bis(octyloxy)butanoyl)oxy)-2-((((3-(diethylamino)propoxy)carbonyl)oxy)methyl)propyl octadeca-9,12-dienoate, also called 3-((4,4-bis(octyloxy)butanoyl)oxy)-2-((((3-(diethylamino)propoxy)carbonyl)oxy)methyl)propyl (9Z,12Z)-octadeca-9,12-dienoate. Lipid A can be depicted as:

[chemical structure]

[0922] Lipid A may be synthesized according to WO2015/095340 (e.g., pp. 84-86). In some embodiments, the amine lipid is an equivalent to Lipid A.

[0923] In some embodiments, an amine lipid is an analog of Lipid A. In some embodiments, a Lipid A analog is an acetal analog of Lipid A. In particular lipid nucleic acid assembly compositions, the acetal analog is a C4-C12 acetal analog. In some embodiments, the acetal analog is a C5-C12 acetal analog. In additional embodiments, the acetal analog is a C5-C10 acetal analog. In further embodiments, the acetal analog is chosen from a C4, C5, C6, C7, C9, C10, C11, and C12 acetal analog.

[0924] Amine lipids and other “biodegradable lipids” suitable for use in the lipid nucleic acid assemblies described herein are biodegradable in vivo or ex vivo. The amine lipids have low toxicity (e.g., are tolerated in animal models without adverse effect in amounts of greater than or equal to 10 mg/kg). In some embodiments, lipid nucleic acid assemblies comprising an amine lipid include those where at least 75% of the amine lipid is cleared from the plasma or the engineered cell within 8, 10, 12, 24, or 48 hours, or 3, 4, 5, 6, 7, or 10 days. In some embodiments, lipid nucleic acid assemblies comprising an amine lipid include those where at least 50% of the nucleic acid, e.g., mRNA or gRNA, is cleared from the plasma within 8, 10, 12, 24, or 48 hours, or 3, 4, 5, 6, 7, or 10 days. In some embodiments, lipid nucleic acid assemblies comprising an amine lipid include those where at least 50% of the lipid nucleic acid assembly is cleared from the plasma within 8, 10, 12, 24, or 48 hours, or 3, 4, 5, 6, 7, or 10 days, for example by measuring a lipid (e.g., an amine lipid), nucleic acid, e.g., RNA/mRNA, or other component. In some embodiments, lipid-encapsulated versus free lipid, RNA, or nucleic acid component of the lipid nucleic acid assembly is measured.

[0925] Biodegradable lipids include, for example the biodegradable lipids of WO/2020/219876, WO/2020/118041, WO/2020/072605, WO/2019/067992, WO/2017/173054, WO2015/095340, and WO2014/136086, and LNPs include LNP compositions described therein, the lipids and compositions of which are hereby incorporated by reference.

[0926] Lipid clearance may be measured as described in literature. See Maier, M. A., et al. Biodegradable Lipids Enabling Rapidly Eliminated Lipid Nanoparticles for Systemic Delivery of RNAi Therapeutics. Mol. Ther. 2013, 21(8), 1570-78 (“Maier”). For example, in Maier, LNP-siRNA systems containing luciferases-targeting siRNA were administered to six- to eight-week-old male C57Bl/6 mice at 0.3 mg/kg by intravenous bolus injection via the lateral tail vein. Blood, liver, and spleen samples were collected at 0.083, 0.25, 0.5, 1, 2, 4, 8, 24, 48, 96, and 168 hours post-dose. Mice were perfused with saline before tissue collection and blood samples were processed to obtain plasma. All samples were processed and analyzed by LC-MS. Further, Maier describes a procedure for assessing toxicity after administration of LNP-siRNA formulations. For example, a luciferase-targeting siRNA was administered at 0, 1, 3, 5, and 10 mg/kg (5 animals/group) via single intravenous bolus injection at a dose volume of 5 mL/kg to male Sprague-Dawley rats. After 24 hours, about 1 mL of blood was obtained from the jugular vein of conscious animals and the serum was isolated. At 72 hours post-dose, all animals were euthanized for necropsy. Assessments of clinical signs, body weight, serum chemistry, organ weights and histopathology were performed. Although Maier describes methods for assessing siRNA-LNP formulations, these methods may be applied to assess clearance, pharmacokinetics, and toxicity of administration of lipid nucleic acid assembly compositions of the present disclosure.

[0927] Ionizable and bioavailable lipids for LNP delivery of nucleic acids known in the art are suitable. Lipids may be ionizable depending upon the pH of the medium they are in. For example, in a slightly acidic medium, the lipid, such as an amine lipid, may be protonated and thus bear a positive charge. Conversely, in a slightly basic medium, such as, for example, blood where pH is approximately 7.35, the lipid, such as an amine lipid, may not be protonated and thus bear no charge.

[0928] The ability of a lipid to bear a charge is related to its intrinsic pKa. In some embodiments, the amine lipids of the present disclosure may each, independently, have a pKa in the range of from about 5.1 to about 7.4. In some embodiments, the bioavailable lipids of the present disclosure may each, independently, have a pKa in the range of from about 5.1 to about 7.4, such as from about 5.5 to about 6.6, from about 5.6 to about 6.4, from about 5.8 to about 6.2, or from about 5.8 to about 6.5. For example, the amine lipids of the present disclosure may each, independently, have a pKa in the range of from about 5.8 to about 6.5. Lipids with a pKa ranging from about 5.1 to about 7.4 are effective for delivery of cargo in vivo, e.g. to the liver. Further, it has been found that lipids with a pKa ranging from about 5.3 to about 6.4 are effective for delivery in vivo, e.g. to tumors. See, e.g., WO2014/136086.

### Additional Lipids

[0929] “Neutral lipids” suitable for use in a lipid nucleic acid assembly composition of the disclosure include, for example, a variety of neutral, uncharged or zwitterionic lipids. Examples of neutral phospholipids suitable for use in the present disclosure include, but are not limited to, 5-heptadecylbenzene-1,3-diol (resorcinol), dipalmitoylphosphatidylcholine (DPPC), distearoylphosphatidylcholine (DSPC), pohsphocholine (DOPC), dimyristoylphosphatidylcholine (DMPC), phosphatidylcholine (PLPC), 1,2-distearoyl-sn-glycero-3-phosphocholine (DAPC), phosphatidylethanolamine (PE), egg phosphatidylcholine (EPC), dilauryloylphosphatidylcholine (DLPC), dimyristoylphosphatidylcholine (DMPC), 1-myristoyl-2-palmitoyl phosphatidylcholine (MPPC), 1-palmitoyl-2-myristoyl phosphatidylcholine (PMPC), 1-palmitoyl-2-stearoyl phosphatidylcholine (PSPC), 1,2-diarachidoyl-sn-glycero-3-phosphocholine (DBPC), 1-stearoyl-2-palmitoyl phosphatidylcholine (SPPC), 1,2-dieicosenoyl-sn-glycero-3-phosphocholine (DEPC), palmitoyloleoyl phosphatidylcholine (POPC), lysophosphatidyl choline, dioleoyl phosphatidylethanolamine (DOPE), dilinoleoylphosphatidylcholine distearoylphosphatidylethanolamine (DSPE), dimyristoyl phosphatidylethanolamine (DMPE), dipalmitoyl phosphatidylethanolamine (DPPE), palmitoyloleoyl phosphatidylethanolamine (POPE), lysophosphatidylethanolamine and combinations thereof. In one embodiment, the neutral phospholipid may be selected from the group consisting of distearoylphosphatidylcholine (DSPC) and dimyristoyl phosphatidyl ethanolamine (DMPE). In another embodiment, the neutral phospholipid may be distearoylphosphatidylcholine (DSPC).

[0930] “Helper lipids” include steroids, sterols, and alkyl resorcinols. Helper lipids suitable for use in the present disclosure include, but are not limited to, cholesterol, 5-heptadecylresorcinol, and cholesterol hemisuccinate. In one embodiment, the helper lipid may be cholesterol. In one embodiment, the helper lipid may be cholesterol hemisuccinate.

[0931] “Stealth lipids” are lipids that alter the length of time the nanoparticles can exist in vivo (e.g., in the blood). Stealth lipids may assist in the formulation process by, for example, reducing particle aggregation and controlling particle size. Stealth lipids used herein may modulate pharmacokinetic properties of the lipid nucleic acid assembly or aid in stability of the nanoparticle ex vivo. Stealth lipids suitable for use in a lipid nucleic acid assembly composition of the disclosure include, but are not limited to, stealth lipids having a hydrophilic head group linked to a lipid moiety. Stealth lipids suitable for use in a lipid nucleic acid assembly composition of the present disclosure and information about the biochemistry of such lipids can be found in Romberg et al., Pharmaceutical Research, Vol. 25, No. 1, 2008, pg. 55-71 and Hoekstra et al., Biochimica et Biophysica Acta 1660 (2004) 41-52. Additional suitable PEG lipids are disclosed, e.g., in WO 2006/007712.

[0932] In one embodiment, the hydrophilic head group of stealth lipid comprises a polymer moiety selected from polymers based on PEG. Stealth lipids may comprise a lipid moiety. In some embodiments, the stealth lipid is a PEG lipid.

[0933] In one embodiment, a stealth lipid comprises a polymer moiety selected from polymers based on PEG (sometimes referred to as poly(ethylene oxide)), poly(oxazoline), poly(vinyl alcohol), poly(glycerol), poly(N-vinylpyrrolidone), polyaminoacids and poly[N-(2-hydroxypropyl)methacrylamide].

[0934] In one embodiment, the PEG lipid comprises a polymer moiety based on PEG (sometimes referred to as poly(ethylene oxide)).

[0935] The PEG lipid further comprises a lipid moiety. In some embodiments, the lipid moiety may be derived from diacylglycerol or diacylglycamide, including those comprising a dialkylglycerol or dialkylglycamide group having alkyl chain length independently comprising from about C4 to about C40 saturated or unsaturated carbon atoms, wherein the chain may comprise one or more functional groups such as, for example, an amide or ester. In some embodiments, the alkyl chain length comprises about C10 to C20. The dialkylglycerol or dialkylglycamide group can further comprise one or more substituted alkyl groups. The chain lengths may be symmetrical or asymmetrical.

[0936] Unless otherwise indicated, the term “PEG” as used herein means any polyethylene glycol or other polyalkylene ether polymer. In one embodiment, PEG is an optionally substituted linear or branched polymer of ethylene glycol or ethylene oxide. In one embodiment, PEG is unsubstituted. In one embodiment, the PEG is substituted, e.g., by one or more alkyl, alkoxy, acyl, hydroxy, or aryl groups. In one embodiment, the term includes PEG copolymers such as PEG-polyurethane or PEG-polypropylene (see, e.g., J. Milton Harris, Poly(ethylene glycol) chemistry: biotechnical and biomedical applications (1992)); in another embodiment, the term does not include PEG copolymers. In one embodiment, the PEG has a molecular weight of from about 130 to about 50,000, in a sub-embodiment, about 150 to about 30,000, in a sub-embodiment, about 150 to about 20,000, in a sub-embodiment about 150 to about 15,000, in a sub-embodiment, about 150 to about 10,000, in a sub-embodiment, about 150 to about 6,000, in a sub-embodiment, about 150 to about 5,000, in a sub-embodiment, about 150 to about 4,000, in a sub-embodiment, about 150 to about 3,000, in a sub-embodiment, about 300 to about 3,000, in a sub-embodiment, about 1,000 to about 3,000, and in a sub-embodiment, about 1,500 to about 2,500.

[0937] In some embodiments, the PEG (e.g., conjugated to a lipid moiety or lipid, such as a stealth lipid), is a “PEG-2K,” also termed “PEG 2000,” which has an average molecular weight of about 2,000 Daltons. PEG-2K is represented herein by the following formula (I), wherein n is 45, meaning that the number averaged degree of polymerization comprises about 45 subunits

[chemical structure]

However, other PEG embodiments known in the art may be used, including, e.g., those where the number-averaged degree of polymerization comprises about 23 subunits (n=23), and/or 68 subunits (n=68). In some embodiments, n may range from about 30 to about 60. In some embodiments, n may range from about 35 to about 55. In some embodiments, n may range from about 40 to about 50. In some embodiments, n may range from about 42 to about 48. In some embodiments, n may be 45. In some embodiments, R may be selected from H, substituted alkyl, and unsubstituted alkyl. In some embodiments, R may be unsubstituted alkyl. In some embodiments, R may be methyl.

[0938] In any of the embodiments described herein, the PEG lipid may be selected from PEG-dilauroylglycerol, PEG-dimyristoylglycerol (e.g., 1,2-dimyristoyl-rac-glycero-3-methylpolyoxyethylene glycol 2000 (PEG2k-DMG) or PEG-DMG (catalog #GM-020 from NOF, Tokyo, Japan), PEG-dipalmitoylglycerol, PEG-distearoylglycerol (PEG-DSPE) (catalog #DSPE-020CN, NOF, Tokyo, Japan), PEG-dilaurylglycamide, PEG-dimyristylglycamide, PEG-dipalmitoylglycamide, and PEG-distearoylglycamide, PEG-cholesterol (1-[8′-(Cholest-5-en-3[beta]-oxy)carboxamido-3′,6′-dioxaoctanyl]carbamoyl-[omega]-methyl-poly(ethylene glycol), PEG-DMB (3,4-ditetradecoxylbenzyl-[omega]-methyl-poly(ethylene glycol)ether), 1,2-dimyristoyl-sn-glycero-3-phosphoethanolamine-N-[methoxy(polyethylene glycol)-2000](PEG2k-DMG) (cat. #880150P from Avanti Polar Lipids, Alabaster, Alabama, USA), 1,2-distearoyl-sn-glycero-3-phosphoethanolamine-N-[methoxy(polyethylene glycol)-2000](PEG2k-DSPE) (cat. #880120C from Avanti Polar Lipids, Alabaster, Alabama, USA), 1,2-distearoyl-sn-glycerol, methoxypolyethylene glycol (PEG2k-DSG; GS-020, NOF Tokyo, Japan), poly(ethylene glycol)-2000-dimethacrylate (PEG2k-DMA), and 1,2-distearyloxypropyl-3-amine-N-[methoxy(polyethylene glycol)-2000] (PEG2k-DSA). In one embodiment, the PEG lipid may be 1,2-dimyristoyl-rac-glycero-3-methylpolyoxyethylene glycol 2000 (PEG2k-DMG). In one embodiment, the PEG lipid may be PEG2k-DMG. In one embodiment, the PEG lipid may be PEG2k-DMG. In some embodiments, the PEG lipid may be PEG2k-DSG. In one embodiment, the PEG lipid may be PEG2k-DSPE. In one embodiment, the PEG lipid may be PEG2k-DMA. In one embodiment, the PEG lipid may be PEG2k-C-DMA. In one embodiment, the PEG lipid may be compound S027, disclosed in WO2016/010840 (paragraphs [00240] to [00244]). In one embodiment, the PEG lipid may be PEG2k-DSA. In one embodiment, the PEG lipid may be PEG2k-C11. In some embodiments, the PEG lipid may be PEG2k-C14. In some embodiments, the PEG lipid may be PEG2k-C16. In some embodiments, the PEG lipid may be PEG2k-C18.

[0939] In preferred embodiments, the PEG lipid includes a glycerol group. In preferred embodiments, the PEG lipid includes a dimyristoylglycerol (DMG) group. In preferred embodiments, the PEG lipid comprises PEG-2k. In preferred embodiments, the PEG lipid is a PEG-DMG. In preferred embodiments, the PEG lipid is a PEG-2k-DMG. In preferred embodiments, the PEG lipid is 1,2-dimyristoyl-rac-glycero-3-methoxypolyethylene glycol2000. In preferred embodiments, the PEG-2k-DMG is 1,2-dimyristoyl-rac-glycero-3-methoxypolyethylene glycol-2000.

LNP Delivery of gRNA

[0940] Lipid nanoparticles (LNPs) are a well-known means for delivery of nucleotide and protein cargo, and may be used for delivery of the gRNAs (e.g., sgRNAs), compositions, or pharmaceutical formulations disclosed herein. In some embodiments, the LNPs deliver nucleic acid, protein, or nucleic acid together with protein. As used herein, lipid nanoparticle (LNP) refers to a particle that comprises a plurality of (i.e., more than one) lipid molecules physically associated with each other by intermolecular forces. The LNPs may be, e.g., microspheres (including unilamellar and multilamellar vesicles, e.g., “liposomes”-lamellar phase lipid bilayers that, in some embodiments, are substantially spherical and, in more particular embodiments, can comprise an aqueous core, e.g., comprising a substantial portion of RNA molecules), a dispersed phase in an emulsion, micelles, or an internal phase in a suspension (see, e.g., WO2017173054, the contents of which are hereby incorporated by reference in their entirety). Any LNP known to those of skill in the art to be capable of delivering nucleotides to subjects may be utilized.

[0941] In some embodiments, the invention comprises a method for delivering any one of the gRNAs disclosed herein to a subject, wherein the gRNA is associated with an LNP. In some embodiments, the gRNA/LNP is also associated with a Cas nuclease or a polynucleotide (e.g., mRNA or DNA) encoding a Cas nuclease.

[0942] In some embodiments, the invention comprises a composition comprising any one of the gRNAs disclosed and an LNP. In some embodiments, the composition further comprises a Cas9 or a polynucleotide (e.g., mRNA or DNA) encoding Cas9.

[0943] In some embodiments, provided herein is a method for delivering any of the guide RNAs described herein to a cell or a population of cells or a subject, including to a cell or population of cells in a subject in vivo, wherein any one or more of the components is associated with an LNP. In some embodiments, the method further comprises an RNA-guided DNA-binding agent (e.g., Cas9 or a polynucleotide (e.g., mRNA or DNA) encoding Cas9).

[0944] In some embodiments, provided herein is a composition comprising any of the guide RNAs described herein or donor construct disclosed herein, alone or in combination, with an LNP. In some embodiments, the composition further comprises an RNA-guided DNA-binding agent (e.g., Cas9 or a polynucleotide (e.g., mRNA or DNA) encoding Cas9).

[0945] In some embodiments, the LNPs comprise cationic lipids. In some embodiments, the LNPs comprise (9Z,12Z)-3-((4,4-bis(octyloxy)butanoyl)oxy)-2-((((3-(diethylamino)propoxy)carbonyl)oxy)methyl)propyl octadeca-9,12-dienoate, also called 3-((4,4-bis(octyloxy)butanoyl)oxy)-2-((((3-(diethylamino)propoxy)carbonyl)oxy)methyl)propyl (9Z,12Z)-octadeca-9,12-dienoate). In some embodiments, the LNPs comprise molar ratios of a cationic lipid amine to RNA phosphate (N:P) of about 4.5. In some embodiments, the LNPs comprise is nonyl 8-((7,7-bis(octyloxy)heptyl)(2-hydroxyethyl)amino)octanoate. In some embodiments, the LNPs comprise molar ratios of a cationic lipid amine to RNA phosphate (N:P) of about 4.5-6.5. In some embodiments, the LNPs comprise molar ratios of a cationic lipid amine to RNA phosphate (N:P) of about 4.5. In some embodiments, the LNPs comprise molar ratios of a cationic lipid amine to RNA phosphate (N:P) of about 6.0.

[0946] In some embodiments, LNPs associated with the gRNAs disclosed herein are for use in preparing a medicament for treating a disease or disorder.

[0947] Electroporation is a well-known means for delivery of cargo, and any electroporation methodology may be used for delivery of any one of the gRNAs disclosed herein. In some embodiments, electroporation may be used to deliver any one of the gRNAs disclosed herein and Cas9 or a polynucleotide (e.g., mRNA or DNA) encoding Cas9.

[0948] In some embodiments, the invention comprises a method for delivering any one of the gRNAs disclosed herein to an ex vivo cell, wherein the gRNA is associated with an LNP or not associated with an LNP. In some embodiments, the gRNA/LNP or gRNA is also associated with a Cas9 or a polynucleotide (e.g., mRNA or DNA) encoding Cas9. (See, e.g., PCT/US2021/029446, incorporated herein by reference)

[0949] In some embodiments, the vector comprises one or more nucleotide sequence(s) encoding an mRNA encoding an RNA-guided DNA nuclease, which can be a Cas nuclease, such as NmeCas9. In some embodiments, the vector comprises an mRNA encoding an RNA-guided DNA nuclease, which can be a Cas protein, such as Cas9. In one embodiment, the Cas9 is NmeCas9.

[0950] In some embodiments, the components can be introduced as naked nucleic acid, as nucleic acid complexed with an agent such as a liposome or poloxamer, or they can be delivered by viral vectors (e.g., adenovirus, AAV, herpesvirus, retrovirus, lentivirus). Methods and compositions for non-viral delivery of nucleic acids include electroporation, lipofection, microinjection, biolistics, virosomes, liposomes, immunoliposomes, LNPs, polycation or lipid:nucleic acid conjugates, naked nucleic acid (e.g., naked DNA/RNA), artificial virions, and agent-enhanced uptake of DNA. Sonoporation using, e.g., the Sonitron 2000 system (Rich-Mar) can also be used for delivery of nucleic acids.

[0951] In some embodiments, LNPs associated with the gRNAs disclosed herein are for use in preparing a medicament for treating a disease or disorder.

[0952] This description and exemplary embodiments should not be taken as limiting. For the purposes of this specification and appended claims, unless otherwise indicated, all numbers expressing quantities, percentages, or proportions, and other numerical values used in the specification and claims, are to be understood as being modified in all instances by the term “about,” to the extent they are not already so modified.

TABLE 4A
Table of Sequences

| SEQ ID | | |
|---|---|---|
| No. | Description | Sequence |
| 600 | Amino acid | MTGAAFKPNPINYILGLDIGIASVGWAMVEIDEEENPIRLIDLGVRVFERAEVPK |
| | sequence for | TGDSLAMARRLARSVRRLTRRRAHRLLRARRLLKREGVLQAADFDENGLIKSLPN |
| | Nme2Cas9 | TPWQLRAAALDRKLTPLEWSAVLLHLIKHRGYLSQRKNEGETADKELGALLKGVA |
| | encoded | NNAHALQTGDFRTPAELALNKFEKESGHIRNQRGDYSHTFSRKDLQAELILLFEK |
| | by mRNA A | QKEFGNPHVSGGLKEGIETLLMTQRPALSGDAVQKMLGHCTFEPAEPKAAKNTYT |
| | | AERFIWLTKLNNLRILEQGSERPLTDTERATLMDEPYRKSKLTYAQARKLLGLED |
| | | TAFFKGLRYGKDNAEASTLMEMKAYHAISRALEKEGLKDKKSPLNLSSELQDEIG |
| | | TAFSLFKTDEDITGRLKDRVQPEILEALLKHISFDKFVQISLKALRRIVPLMEQG |
| | | KRYDEACAEIYGDHYGKKNTEEKIYLPPIPADEIRNPVVLRALSQARKVINGVVR |
| | | RYGSPARIHIETAREVGKSFKDRKEIEKRQEENRKDREKAAAKFREYFPNFVGEP |
| | | KSKDILKLRLYEQQHGKCLYSGKEINLVRLNEKGYVEIDHALPESRTWDDSFNNK |
| | | VLVLGSENQNKGNQTPYEYENGKDNSREWQEFKARVETSREPRSKKQRILLQKED |
| | | EDGFKECNLNDTRYVNRFLCQFVADHILLTGKGKRRVFASNGQITNLLRGFWGLR |
| | | KVRAENDRHHALDAVVVACSTVAMQQKITRFVRYKEMNAFDGKTIDKETGKVLHQ |
| | | KTHFPQPWEFFAQEVMIRVFGKPDGKPEFEEADTPEKLRTLLAEKLSSRPEAVHE |
| | | YVTPLFVSRAPNRKMSGAHKDTLRSAKRFVKHNEKISVKRVWLTEIKLADLENMV |
| | | NYKNGREIELYEALKARLEAYGGNAKQAFDPKDNPFYKKGGQLVKAVRVEKTQES |
| | | GVLLNKKNAYTIADNGDMVRVDVFCKVDKKGKNQYFIVPIYAWQVAENILPDIDC |
| | | KGYRIDDSYTFCFSLHKYDLIAFQKDEKSKVEFAYYINCDSSNGRFYLAWHDKGS |
| | | KEQQFRISTQNLVLIQKYQVNELGKEIRPCRLKKRPPVRSGKRTADGSEFESPKK |
| | | KRKVE |
| 601 | Amino acid | MTGAAFKPNPINYILGLDIGIASVGWAMVEIDEEENPIRLIDLGVRVFERAEVPK |
| | sequence for | TGDSLAMARRLARSVRRLTRRRAHRLLRARRLLKREGVLQAADFDENGLIKSLPN |
| | Nme2Cas9 | TPWQLRAAALDRKLTPLEWSAVLLHLIKHRGYLSQRKNEGETADKELGALLKGVA |
| | encoded | NNAHALQTGDFRTPAELALNKFEKESGHIRNQRGDYSHTFSRKDLQAELILLFEK |
| | by mRNA B | QKEFGNPHVSGGLKEGIETLLMTQRPALSGDAVQKMLGHCTFEPAEPKAAKNTYT |
| | | AERFIWLTKLNNLRILEQGSERPLTDTERATLMDEPYRKSKLTYAQARKLLGLED |
| | | TAFFKGLRYGKDNAEASTLMEMKAYHAISRALEKEGLKDKKSPLNLSSELQDEIG |
| | | TAFSLFKTDEDITGRLKDRVQPEILEALLKHISFDKFVQISLKALRRIVPLMEQG |
| | | KRYDEACAEIYGDHYGKKNTEEKIYLPPIPADEIRNPVVLRALSQARKVINGVVR |
| | | RYGSPARIHIETAREVGKSFKDRKEIEKRQEENRKDREKAAAKFREYFPNFVGEP |
| | | KSKDILKLRLYEQQHGKCLYSGKEINLVRLNEKGYVEIDHALPESRTWDDSFNNK |
| | | VLVLGSENQNKGNQTPYEYENGKDNSREWQEFKARVETSRFPRSKKQRILLQKFD |
| | | EDGEKECNLNDTRYVNRFLCQFVADHILLTGKGKRRVFASNGQITNLLRGFWGLR |
| | | KVRAENDRHHALDAVVVACSTVAMQQKITRFVRYKEMNAFDGKTIDKETGKVLHQ |
| | | KTHFPQPWEFFAQEVMIRVFGKPDGKPEFEEADTPEKLRTLLAEKLSSRPEAVHE |
| | | YVTPLFVSRAPNRKMSGAHKDTLRSAKRFVKHNEKISVKRVWLTEIKLADLENMV |
| | | NYKNGREIELYEALKARLEAYGGNAKQAFDPKDNPFYKKGGQLVKAVRVEKTQES |
| | | GVLLNKKNAYTIADNGDMVRVDVFCKVDKKGKNQYFIVPIYAWQVAENILPDIDC |
| | | KGYRIDDSYTFCFSLHKYDLIAFQKDEKSKVEFAYYINCDSSNGRFYLAWHDKGS |
| | | KEQQFRISTQNLVLIQKYQVNELGKEIRPCRLKKRPPVRSGKRTADGSEFESPKK |
| | | KRKVE |
| 602 | Amino acid | MTGAAFKPNPINYILGLDIGIASVGWAMVEIDEEENPIRLIDLGVRVFERAEVPK |
| | sequence for | TGDSLAMARRLARSVRRLTRRRAHRLLRARRLLKREGVLQAADFDENGLIKSLPN |
| | Nme2Cas9 | TPWQLRAAALDRKLTPLEWSAVLLHLIKHRGYLSQRKNEGETADKELGALLKGVA |
| | encoded | NNAHALQTGDFRTPAELALNKFEKESGHIRNQRGDYSHTFSRKDLQAELILLFEK |
| | by mRNA C | QKEFGNPHVSGGLKEGIETLLMTQRPALSGDAVQKMLGHCTFEPAEPKAAKNTYT |
| | | AERFIWLTKLNNLRILEQGSERPLTDTERATLMDEPYRKSKLTYAQARKLLGLED |
| | | TAFFKGLRYGKDNAEASTLMEMKAYHAISRALEKEGLKDKKSPLNLSSELQDEIG |
| | | TAFSLEKTDEDITGRLKDRVQPEILEALLKHISFDKFVQISLKALRRIVPLMEQG |
| | | KRYDEACAEIYGDHYGKKNTEEKIYLPPIPADEIRNPVVLRALSQARKVINGVVR |
| | | RYGSPARIHIETAREVGKSFKDRKEIEKRQEENRKDREKAAAKFREYFPNFVGEP |
| | | KSKDILKLRLYEQQHGKCLYSGKEINLVRLNEKGYVEIDHALPESRTWDDSFNNK |
| | | VLVLGSENQNKGNQTPYEYENGKDNSREWQEFKARVETSRFPRSKKQRILLQKFD |
| | | EDGEKECNLNDTRYVNRFLCQFVADHILLTGKGKRRVFASNGQITNLLRGFWGLR |
| | | KVRAENDRHHALDAVVVACSTVAMQQKITRFVRYKEMNAFDGKTIDKETG |
| | | KVLHQKTHFPQPWEFFAQEVMIRVFGKPDGKPEFEEADTPEKLRTLLAEKLSSRP |
| | | EAVHEYVTPLFVSRAPNRKMSGAHKDTLRSAKRFVKHNEKISVKRVWLTEIKLAD |
| | | LENMVNYKNGREIELYEALKARLEAYGGNAKQAFDPKDNPFYKKGGQLVKAVRVE |
| | | KTQESGVLLNKKNAYTIADNGDMVRVDVFCKVDKKGKNQYFIVPIYAWQVAENIL |
| | | PDIDCKGYRIDDSYTFCFSLHKYDLIAFQKDEKSKVEFAYYINCDSSNGRFYLAW |
| | | HDKGSKEQQFRISTQNLVLIQKYQVNELGKEIRPCRLKKRPPVRSGKRTADGSEF |
| | | ESPKKKRKVE |
| 603 | Amino acid | MTGAAFKPNPINYILGLDIGIASVGWAMVEIDEEENPIRLIDLGVRVFERAEVPK |
| | sequence for | TGDSLAMARRLARSVRRLTRRRAHRLLRARRLLKREGVLQAADEDENGLIKSLPN |
| | Nme2Cas9 | TPWQLRAAALDRKLTPLEWSAVLLHLIKHRGYLSQRKNEGETADKELGALLKGVA |
| | encoded | NNAHALQTGDFRTPAELALNKFEKESGHIRNQRGDYSHTFSRKDLQAELILLFEK |
| | by mRNA D | QKEFGNPHVSGGLKEGIETLLMTQRPALSGDAVQKMLGHCTFEPAEPKAAKNTYT |
| | | AERFIWLTKLNNLRILEQGSERPLTDTERATLMDEPYRKSKLTYAQARKLLGLED |
| | | TAFFKGLRYGKDNAEASTLMEMKAYHAISRALEKEGLKDKKSPLNLSSELQDEIG |
| | | TAFSLFKTDEDITGRLKDRVQPEILEALLKHISFDKFVQISLKALRRIVPLMEQG |
| | | KRYDEACAEIYGDHYGKKNTEEKIYLPPIPADEIRNPVVLRALSQARKVINGVVR |
| | | RYGSPARIHIETAREVGKSFKDRKEIEKRQEENRKDREKAAAKFREYFPNFVGEP |
| | | KSKDILKLRLYEQQHGKCLYSGKEINLVRLNEKGYVEIDHALPESRTWDDSENNK |
| | | VLVLGSENQNKGNQTPYEYENGKDNSREWQEFKARVETSREPRSKKQRILLQKFD |
| | | EDGEKECNLNDTRYVNRELCQFVADHILLTGKGKRRVFASNGQITNLLRGFWGLR |
| | | KVRAENDRHHALDAVVVACSTVAMQQKITRFVRYKEMNAFDGKTIDKETGKVLHQ |
| | | KTHFPQPWEFFAQEVMIRVFGKPDGKPEFEEADTPEKLRTLLAEKLSSRPEAVHE |
| | | YVTPLFVSRAPNRKMSGAHKDTLRSAKRFVKHNEKISVKRVWLTEIKLADLENMV |
| | | NYKNGREIELYEALKARLEAYGGNAKQAFDPKDNPFYKKGGQLVKAVRVEKTQES |
| | | GVLLNKKNAYTIADNGDMVRVDVFCKVDKKGKNQYFIVPIYAWQVAENILPDIDC |
| | | KGYRIDDSYTFCFSLHKYDLIAFQKDEKSKVEFAYYINCDSSNGRFYLAWHDKGS |
| | | KEQQFRISTQNLVLIQKYQVNELGKEIRPCRLKKRPPVRSGKRTADGSEFESPKK |
| | | KRKVE |
| 604 | Amino acid | MEASPASGPRHLMDPHIFTSNENNGIGRHKTYLCYEVERLDNGTSVKMDQHRGFL |
| | sequence for | HNQAKNLLCGFYGRHAELRELDLVPSLQLDPAQIYRVTWFISWSPCFSWGCAGEV |
| | SpyCas9 base | RAFLQENTHVRLRIFAARIYDYDPLYKEALQMLRDAGAQVSIMTYDEFKHCWDTF |
| | editor encoded | VDHQGCPFQPWDGLDEHSQALSGRLRAILQNQGNSGSETPGTSESATPESDKKYS |
| | by mRNA E | IGLAIGTNSVGWAVITDEYKVPSKKFKVLGNTDRHSIKKNLIGALLFDSGETAEA |
| | | TRLKRTARRRYTRRKNRICYLQEIFSNEMAKVDDSFFHRLEESFLVEEDKKHERH |
| | | PIFGNIVDEVAYHEKYPTIYHLRKKLVDSTDKADLRLIYLALAHMIKFRGHFLIE |
| | | GDLNPDNSDVDKLFIQLVQTYNQLFEENPINASGVDAKAILSARLSKSRRLENLI |
| | | AQLPGEKKNGLFGNLIALSLGLTPNFKSNFDLAEDAKLQLSKDTYDDDLDNLLAQ |
| | | IGDQYADLFLAAKNLSDAILLSDILRVNTEITKAPLSASMIKRYDEHHQDLTLLK |
| | | ALVRQQLPEKYKEIFFDQSKNGYAGYIDGGASQEEFYKFIKPILEKMDGTEELLV |
| | | KLNREDLLRKQRTFDNGSIPHQIHLGELHAILRRQEDFYPELKDNREKIEKILTF |
| | | RIPYYVGPLARGNSRFAWMTRKSEETITPWNFEEVVDKGASAQSFIERMTNFDKN |
| | | LPNEKVLPKHSLLYEYFTVYNELTKVKYVTEGMRKPAFLSGEQKKAIVDLLFKTN |
| | | RKVTVKQLKEDYFKKIECFDSVEISGVEDRENASLGTYHDLLKIIKDKDELDNEE |
| | | NEDILEDIVLTLTLFEDREMIEERLKTYAHLFDDKVMKQLKRRRYTGWGRLSRKL |
| | | INGIRDKQSGKTILDELKSDGFANRNFMQLIHDDSLTFKEDIQKAQVSGQGDSLH |
| | | EHIANLAGSPAIKKGILQTVKVVDELVKVMGRHKPENIVIEMARENQTTQKGQKN |
| | | SRERMKRIEEGIKELGSQILKEHPVENTQLQNEKLYLYYLQNGRDMYVDQELDIN |
| | | RLSDYDVDHIVPQSFLKDDSIDNKVLTRSDKNRGKSDNVPSEEVVKKMKNYWRQL |
| | | LNAKLITQRKFDNLTKAERGGLSELDKAGFIKRQLVETRQITKHVAQILDSRMNT |
| | | KYDENDKLIREVKVITLKSKLVSDERKDFQFYKVREINNYHHAHDAYLNAVVGTA |
| | | LIKKYPKLESEFVYGDYKVYDVRKMIAKSEQEIGKATAKYFFYSNIMNFFKTEIT |
| | | LANGEIRKRPLIETNGETGEIVWDKGRDFATVRKVLSMPQVNIVKKTEVQTGGES |
| | | KESILPKRNSDKLIARKKDWDPKKYGGEDSPTVAYSVLVVAKVEKGKSKKLKSVK |
| | | ELLGITIMERSSFEKNPIDELEAKGYKEVKKDLIIKLPKYSLFELENGRKRMLAS |
| | | AGELQKGNELALPSKYVNFLYLASHYEKLKGSPEDNEQKQLFVEQHKHYLDEIIE |
| | | QISEFSKRVILADANLDKVLSAYNKHRDKPIREQAENIIHLETLTNLGAPAAFKY |
| | | FDTTIDRKRYTSTKEVLDATLIHQSITGLYETRIDLSQLGGDGGGSPKKKRKV |
| 605 | Amino acid | MAAFKPNSINYILGLDIGIASVGWAMVEIDEEENPIRLIDLGVRVFERAEVPKTG |
| | sequence for | DSLAMARRLARSVRRLTRRRAHRLLRTRRLLKREGVLQAANFDENGLIKSLPNTP |
| | Nme1Cas9 | WQLRAAALDRKLTPLEWSAVLLHLIKHRGYLSQRKNEGETADKELGALLKGVAGN |
| | encoded | AHALQTGDFRTPAELALNKFEKESGHIRNQRSDYSHTESRKDLQAELILLFEKQK |
| | by mRNA F | EFGNPHVSGGLKEGIETLLMTQRPALSGDAVQKMLGHCTFEPAEPKAAKNTYTAE |
| | | RFIWLTKLNNLRILEQGSERPLTDTERATLMDEPYRKSKLTYAQARKLLGLEDTA |
| | | FFKGLRYGKDNAEASTLMEMKAYHAISRALEKEGLKDKKSPLNLSPELQDEIGTA |
| | | FSLEKTDEDITGRLKDRIQPEILEALLKHISFDKFVQISLKALRRIVPLMEQGKR |
| | | YDEACAEIYGDHYGKKNTEEKIYLPPIPADEIRNPVVLRALSQARKVINGVVRRY |
| | | GSPARIHIETAREVGKSFKDRKEIEKRQEENRKDREKAAAKFREYFPNFVGEPKS |
| | | KDILKLRLYEQQHGKCLYSGKEINLGRLNEKGYVEIDHALPESRTWDDSFNNKVL |
| | | VLGSENQNKGNQTPYEYENGKDNSREWQEFKARVETSRFPRSKKQRILLQKFDED |
| | | GEKERNLNDTRYVNRFLCQFVADRMRLTGKGKKRVFASNGQITNLLRGFWGLRKV |
| | | RAENDRHHALDAVVVACSTVAMQQKITRFVRYKEMNAFDGKTIDKETGEVLHQKT |
| | | HFPQPWEFFAQEVMIRVFGKPDGKPEFEEADTLEKLRTLLAEKLSSRPEAVHEYV |
| | | TPLFVSRAPNRKMSGQGHMETVKSAKRLDEGVSVLRVPLTQLKLKDLEKMVNRER |
| | | EPKLYEALKARLEAHKDDPAKAFAEPFYKYDKAGNRTQQVKAVRVEQVQKTGVWV |
| | | RNHNGIADNATMVRVDVFEKGDKYYLVPIYSWQVAKGILPDRAVVQGKDEEDWQL |
| | | IDDSENFKFSLHPNDLVEVITKKARMEGYEASCHRGTGNINIRIHDLDHKIGKNG |
| | | ILEGIGVKTALSFQKYQIDELGKEIRPCRLKKRPPVRSGKRTADGSEFESPKKKR |
| | | KVE |
| 606 | Amino acid | MTNLSDIIEKETGKQLVIQESILMLPEEVEEVIGNKPESDILVHTAYDESTDENV |
| | sequence | MLLTSDAPEYKPWALVIQDSNGENKIKMLSGGSKRTADGSEFESPKKKRKVE |
| | for UGI | |
| | encoded by | |
| | mRNA G | |
| 607 | Amino acid | MAAFKPNPINYILGLDIGIASVGWAMVEIDEEENPIRLIDLGVRVFERAEVPKTG |
| | sequence for | DSLAMARRLARSVRRLTRRRAHRLLRARRLLKREGVLQAADEDENGLIKSLPNTP |
| | Nme2Cas9 | WQLRAAALDRKLTPLEWSAVLLHLIKHRGYLSQRKNEGETADKELGALLKGVANN |
| | encoded | AHALQTGDFRTPAELALNKFEKESGHIRNQRGDYSHTFSRKDLQAELILLFEKQK |
| | by mRNA H | EFGNPHVSGGLKEGIETLLMTQRPALSGDAVQKMLGHCTFEPAEPKAAKNTYTAE |
| | | RFIWLTKLNNLRILEQGSERPLTDTERATLMDEPYRKSKLTYAQARKLLGLEDTA |
| | | FFKGLRYGKDNAEASTLMEMKAYHAISRALEKEGLKDKKSPLNLSSELQDEIGTA |
| | | FSLEKTDEDITGRLKDRVQPEILEALLKHISFDKFVQISLKALRRIVPLMEQGKR |
| | | YDEACAEIYGDHYGKKNTEEKIYLPPIPADEIRNPVVLRALSQARKVINGVVRRY |
| | | GSPARIHIETAREVGKSFKDRKEIEKRQEENRKDREKAAAKFREYFPNFVGEPKS |
| | | KDILKLRLYEQQHGKCLYSGKEINLVRLNEKGYVEIDHALPESRTWDDSFNNKVL |
| | | VLGSENQNKGNQTPYEYENGKDNSREWQEFKARVETSRFPRSKKQRILLQKEDED |
| | | GEKECNLNDTRYVNRFLCQFVADHILLTGKGKRRVFASNGQITNLLRGFWGLRKV |
| | | RAENDRHHALDAVVVACSTVAMQQKITRFVRYKEMNAFDGKTIDKETGKVLHQKT |
| | | HFPQPWEFFAQEVMIRVFGKPDGKPEFEEADTPEKLRTLLAEKLSSRPEAVHEYV |
| | | TPLFVSRAPNRKMSGAHKDTLRSAKRFVKHNEKISVKRVWLTEIKLADLENMVNY |
| | | KNGREIELYEALKARLEAYGGNAKQAFDPKDNPFYKKGGQLVKAVRVEKTQESGV |
| | | LLNKKNAYTIADNGDMVRVDVFCKVDKSGGGSPKKKRKVSGGSGKNQYFIVPIYA |
| | | WQVAENILPDIDCKGYRIDDSYTFCFSLHKYDLIAFQKDEKSKVEFAYYINCDSS |
| | | NGRFYLAWHDKGSKEQQFRISTQNLVLIQKYQVNELGKEIRPCRLKKRPPVR |
| 608 | Amino acid | MVPKKKRKVAAFKPNPINYILGLDIGIASVGWAMVEIDEEENPIRLIDLGVRVFE |
| | sequence for | RAEVPKTGDSLAMARRLARSVRRLTRRRAHRLLRARRLLKREGVLQAADEDENGL |
| | Nme2Cas9 | IKSLPNTPWQLRAAALDRKLTPLEWSAVLLHLIKHRGYLSQRKNEGETADKELGA |
| | encoded | LLKGVANNAHALQTGDFRTPAELALNKFEKESGHIRNQRGDYSHTFSRKDLQAEL |
| | by mRNA I | ILLFEKQKEFGNPHVSGGLKEGIETLLMTQRPALSGDAVQKMLGHCTFEPAEPKA |
| | | AKNTYTAERFIWLTKLNNLRILEQGSERPLTDTERATLMDEPYRKSKLTYAQARK |
| | | LLGLEDTAFFKGLRYGKDNAEASTLMEMKAYHAISRALEKEGLKDKKSPLNLSSE |
| | | LQDEIGTAFSLFKTDEDITGRLKDRVQPEILEALLKHISEDKFVQISLKALRRIV |
| | | PLMEQGKRYDEACAEIYGDHYGKKNTEEKIYLPPIPADEIRNPVVLRALSQARKV |
| | | INGVVRRYGSPARIHIETAREVGKSFKDRKEIEKRQEENRKDREKAAAKFREYFP |
| | | NFVGEPKSKDILKLRLYEQQHGKCLYSGKEINLVRLNEKGYVEIDHALPFSRTWD |
| | | DSFNNKVLVLGSENQNKGNQTPYEYENGKDNSREWQEFKARVETSRFPRSKKQRI |
| | | LLQKEDEDGEKECNLNDTRYVNRFLCQFVADHILLTGKGKRRVFASNGQITNLLR |
| | | GFWGLRKVRAENDRHHALDAVVVACSTVAMQQKITRFVRYKEMNAFDGKTIDKET |
| | | GKVLHQKTHFPQPWEFFAQEVMIRVFGKPDGKPEFEEADTPEKLRTLLAEKLSSR |
| | | PEAVHEYVTPLFVSRAPNRKMSGAHKDTLRSAKRFVKHNEKISVKRVWLTEIKLA |
| | | DLENMVNYKNGREIELYEALKARLEAYGGNAKQAFDPKDNPFYKKGGQLVKAVRV |
| | | EKTQESGVLLNKKNAYTIADNGDMVRVDVFCKVDKKGKNQYFIVPIYAWQVAENI |
| | | LPDIDCKGYRIDDSYTFCFSLHKYDLIAFQKDEKSKVEFAYYINCDSSNGRFYLA |
| | | WHDKGSKEQQFRISTQNLVLIQKYQVNELGKEIRPCRLKKRPPVRYPYDVPDYAA |
| | | APAAKKKKLD |
| 609 | Amino acid | MAAFKPNPINYILGLDIGIASVGWAMVEIDEEENPIRLIDLGVRVFERAEVPKTG |
| | sequence for | DSLAMARRLARSVRRLTRRRAHRLLRARRLLKREGVLQAADFDENGLIKSLPNTP |
| | Nme2Cas9 | WQLRAAALDRKLTPLEWSAVLLHLIKHRGYLSQRKNEGETADKELGALLKGVANN |
| | encoded | AHALQTGDFRTPAELALNKFEKESGHIRNQRGDYSHTFSRKDLQAELILLFEKQK |
| | by mRNA J | EFGNPHVSGGLKEGIETLLMTQRPALSGDAVQKMLGHCTFEPAEPKAAKNTYTAE |
| | | RFIWLTKLNNLRILEQGSERPLTDTERATLMDEPYRKSKLTYAQARKLLGLEDTA |
| | | FFKGLRYGKDNAEASTLMEMKAYHAISRALEKEGLKDKKSPLNLSSELQDEIGTA |
| | | FSLEKTDEDITGRLKDRVQPEILEALLKHISFDKFVQISLKALRRIVPLMEQGKR |
| | | YDEACAEIYGDHYGKKNTEEKIYLPPIPADEIRNPVVLRALSQARKVINGVVRRY |
| | | GSPARIHIETAREVGKSFKDRKEIEKRQEENRKDREKAAAKFREYEPNFVGEPKS |
| | | KDILKLRLYEQQHGKCLYSGKEINLVRLNEKGYVEIDHALPFSRTWDDSFNNKVL |
| | | VLGSENQNKGNQTPYEYENGKDNSREWQEFKARVETSREPRSKKQRILLQKFDED |
| | | GFKECNLNDTRYVNRFLCQFVADHILLTGKGKRRVFASNGQITNLLRGFWGLRKV |
| | | RAENDRHHALDAVVVACSTVAMQQKITRFVRYKEMNAFDGKTIDKETGKVLHQKT |
| | | HFPQPWEFFAQEVMIRVFGKPDGKPEFEEADTPEKLRTLLAEKLSSRPEAVHEYV |
| | | TPLFVSRAPNRKMSGAHKDTLRSAKRFVKHNEKISVKRVWLTEIKLADLENMVNY |
| | | KNGREIELYEALKARLEAYGGNAKQAFDPKDNPFYKKGGQLVKAVRVEKTQESGV |
| | | LLNKKNAYTIADNGDMVRVDVFCKVDKKGKNQYFIVPIYAWQVAENILPDIDCKG |
| | | YRIDDSYTFCFSLHKYDLIAFQKDEKSKVEFAYYINCDSSNGRFYLAWHDKGSKE |
| | | QQFRISTQNLVLIQKYQVNELGKEIRPCRLKKRPPVR |
| 610 | Amino acid | MAAFKPNPINYILGLDIGIASVGWAMVEIDEEENPIRLIDLGVRVFERAEVPKTG |
| | sequence for | DSLAMARRLARSVRRLTRRRAHRLLRARRLLKREGVLQAADFDENGLIKSLPNTP |
| | Nme2Cas9 | WQLRAAALDRKLTPLEWSAVLLHLIKHRGYLSQRKNEGETADKELGALLKGVANN |
| | encoded | AHALQTGDFRTPAELALNKFEKESGHIRNQRGDYSHTFSRKDLQAELILLFEKQK |
| | by mRNA K | EFGNPHVSGGLKEGIETLLMTQRPALSGDAVQKMLGHCTFEPAEPKAAKNTYTAE |
| | | RFIWLTKLNNLRILEQGSERPLTDTERATLMDEPYRKSKLTYAQARKLLGLEDTA |
| | | FFKGLRYGKDNAEASTLMEMKAYHAISRALEKEGLKDKKSPLNLSSELQDEIGTA |
| | | FSLEKTDEDITGRLKDRVQPEILEALLKHISFDKFVQISLKALRRIVPLMEQGKR |
| | | YDEACAEIYGDHYGKKNTEEKIYLPPIPADEIRNPVVLRALSQARKVINGVVRRY |
| | | GSPARIHIETAREVGKSFKDRKEIEKRQEENRKDREKAAAKFREYFPNFVGEPKS |
| | | KDILKLRLYEQQHGKCLYSGKEINLVRLNEKGYVEIDHALPFSRTWDDSFNNKVL |
| | | VLGSENQNKGNQTPYEYFNGKDNSREWQEFKARVETSRFPRSKKQRILLQKFDED |
| | | GEKECNLNDTRYVNRFLCQFVADHILLTGKGKRRVFASNGQITNLLRGFWGLRKV |
| | | RAENDRHHALDAVVVACSTVAMQQKITRFVRYKEMNAFDGKTIDKETGKVLHQKT |
| | | HFPQPWEFFAQEVMIRVFGKPDGKPEFEEADTPEKLRTLLAEKLSSRPEAVHEYV |
| | | TPLFVSRAPNRKMSGAHKDTLRSAKRFVKHNEKISVKRVWLTEIKLADLENMVNY |
| | | KNGREIELYEALKARLEAYGGNAKQAFDPKDNPFYKKGGQLVKAVRVEKTQESGV |
| | | LLNKKNAYTIADNGDMVRVDVFCKVDKKGKNQYFIVPIYAWQVAENILPDIDCKG |
| | | YRIDDSYTFCFSLHKYDLIAFQKDEKSKVEFAYYINCDSSNGRFYLAWHDKGSKE |
| | | QQFRISTQNLVLIQKYQVNELGKEIRPCRLKKRPPVR |
| 611 | Amino acid | MDGSGGGSPKKKRKVGGSGGGAAFKPNPINYILGLDIGIASVGWAMVEIDEEENP |
| | sequence for | IRLIDLGVRVFERAEVPKTGDSLAMARRLARSVRRLTRRRAHRLLRARRLLKREG |
| | Nme2Cas9 | VLQAADEDENGLIKSLPNTPWQLRAAALDRKLTPLEWSAVLLHLIKHRGYLSQRK |
| | encoded | NEGETADKELGALLKGVANNAHALQTGDFRTPAELALNKFEKESGHIRNQRGDYS |
| | by mRNA L | HTFSRKDLQAELILLFEKQKEFGNPHVSGGLKEGIETLLMTQRPALSGDAVQKML |
| | | GHCTFEPAEPKAAKNTYTAERFIWLTKLNNLRILEQGSERPLTDTERATLMDEPY |
| | | RKSKLTYAQARKLLGLEDTAFFKGLRYGKDNAEASTLMEMKAYHAISRALEKEGL |
| | | KDKKSPLNLSSELQDEIGTAFSLEKTDEDITGRLKDRVQPEILEALLKHISFDKF |
| | | VQISLKALRRIVPLMEQGKRYDEACAEIYGDHYGKKNTEEKIYLPPIPADEIRNP |
| | | VVLRALSQARKVINGVVRRYGSPARIHIETAREVGKSFKDRKEIEKRQEENRKDR |
| | | EKAAAKFREYFPNFVGEPKSKDILKLRLYEQQHGKCLYSGKEINLVRLNEKGYVE |
| | | IDHALPFSRTWDDSFNNKVLVLGSENQNKGNQTPYEYFNGKDNSREWQEFKARVE |
| | | TSRFPRSKKQRILLQKEDEDGFKECNLNDTRYVNRFLCQFVADHILLTGKGKRRV |
| | | FASNGQITNLLRGFWGLRKVRAENDRHHALDAVVVACSTVAMQQKITRFVRYKEM |
| | | NAFDGKTIDKETGKVLHQKTHFPQPWEFFAQEVMIRVFGKPDGKPEFEEADTPEK |
| | | LRTLLAEKLSSRPEAVHEYVTPLFVSRAPNRKMSGAHKDTLRSAKRFVKHNEKIS |
| | | VKRVWLTEIKLADLENMVNYKNGREIELYEALKARLEAYGGNAKQAFDPKDNPFY |
| | | KKGGQLVKAVRVEKTQESGVLLNKKNAYTIADNGDMVRVDVFCKVDKKGKNQYFI |
| | | VPIYAWQVAENILPDIDCKGYRIDDSYTFCFSLHKYDLIAFQKDEKSKVEFAYYI |
| | | NCDSSNGRFYLAWHDKGSKEQQFRISTQNLVLIQKYQVNELGKEIRPCRLKKRPP |
| | | VR |
| 612 | Amino acid | MDGSGGGSPKKKRKVGGSGGGAAFKPNPINYILGLDIGIASVGWAMVEIDEEENP |
| | sequence for | IRLIDLGVRVFERAEVPKTGDSLAMARRLARSVRRLTRRRAHRLLRARRLLKREG |
| | Nme2Cas9 with | VLQAADFDENGLIKSLPNTPWQLRAAALDRKLTPLEWSAVLLHLIKHRGYLSQRK |
| | HiBiT tag | NEGETADKELGALLKGVANNAHALQTGDFRTPAELALNKFEKESGHIRNQRGDYS |
| | encoded by mRNA | HTFSRKDLQAELILLFEKQKEFGNPHVSGGLKEGIETLLMTQRPALSGDAVQKML |
| | M | GHCTFEPAEPKAAKNTYTAERFIWLTKLNNLRILEQGSERPLTDTERATLMDEPY |
| | | RKSKLTYAQARKLLGLEDTAFFKGLRYGKDNAEASTLMEMKAYHAISRALEKEGL |
| | | KDKKSPLNLSSELQDEIGTAFSLFKTDEDITGRLKDRVQPEILEALLKHISFDKF |
| | | VQISLKALRRIVPLMEQGKRYDEACAEIYGDHYGKKNTEEKIYLPPIPADEIRNP |
| | | VVLRALSQARKVINGVVRRYGSPARIHIETAREVGKSFKDRKEIEKRQEENRKDR |
| | | EKAAAKFREYFPNFVGEPKSKDILKLRLYEQQHGKCLYSGKEINLVRLNEKGYVE |
| | | IDHALPESRTWDDSFNNKVLVLGSENQNKGNQTPYEYENGKDNSREWQEFKARVE |
| | | TSRFPRSKKQRILLQKEDEDGFKECNLNDTRYVNRFLCQFVADHILLTGKGKRRV |
| | | FASNGQITNLLRGFWGLRKVRAENDRHHALDAVVVACSTVAMQQKITRFVRYKEM |
| | | NAFDGKTIDKETGKVLHQKTHEPQPWEFFAQEVMIRVFGKPDGKPEFEEADTPEK |
| | | LRTLLAEKLSSRPEAVHEYVTPLFVSRAPNRKMSGAHKDTLRSAKRFVKHNEKIS |
| | | VKRVWLTEIKLADLENMVNYKNGREIELYEALKARLEAYGGNAKQAFDPKDNPFY |
| | | KKGGQLVKAVRVEKTQESGVLLNKKNAYTIADNGDMVRVDVFCKVDKKGKNQYFI |
| | | VPIYAWQVAENILPDIDCKGYRIDDSYTFCFSLHKYDLIAFQKDEKSKVEFAYYI |
| | | NCDSSNGRFYLAWHDKGSKEQQFRISTQNLVLIQKYQVNELGKEIRPCRLKKRPP |
| | | VRSESATPESVSGWRLEKKIS |
| 613 | Amino acid | MDGSGGGSPKKKRKVGGSGGGAAFKPNPINYILGLDIGIASVGWAMVEIDEEENP |
| | sequence for | IRLIDLGVRVFERAEVPKTGDSLAMARRLARSVRRLTRRRAHRLLRARRLLKREG |
| | Nme2Cas9 | VLQAADFDENGLIKSLPNTPWQLRAAALDRKLTPLEWSAVLLHLIKHRGYLSQRK |
| | encoded | NEGETADKELGALLKGVANNAHALQTGDFRTPAELALNKFEKESGHIRNQRGDYS |
| | by mRNA N | HTFSRKDLQAELILLFEKQKEFGNPHVSGGLKEGIETLLMTQRPALSGDAVQKML |
| | | GHCTFEPAEPKAAKNTYTAERFIWLTKLNNLRILEQGSERPLTDTERATLMDEPY |
| | | RKSKLTYAQARKLLGLEDTAFFKGLRYGKDNAEASTLMEMKAYHAISRALEKEGL |
| | | KDKKSPLNLSSELQDEIGTAFSLEKTDEDITGRLKDRVQPEILEALLKHISFDKF |
| | | VQISLKALRRIVPLMEQGKRYDEACAEIYGDHYGKKNTEEKIYLPPIPADEIRNP |
| | | VVLRALSQARKVINGVVRRYGSPARIHIETAREVGKSFKDRKEIEKRQEENRKDR |
| | | EKAAAKFREYFPNFVGEPKSKDILKLRLYEQQHGKCLYSGKEINLVRLNEKGYVE |
| | | IDHALPFSRTWDDSENNKVLVLGSENQNKGNQTPYEYENGKDNSREWQEFKARVE |
| | | TSRFPRSKKQRILLQKEDEDGFKECNLNDTRYVNRFLCQFVADHILLTGKGKRRV |
| | | FASNGQITNLLRGFWGLRKVRAENDRHHALDAVVVACSTVAMQQKITREVRYKEM |
| | | NAFDGKTIDKETGKVLHQKTHFPQPWEFFAQEVMIRVFGKPDGKPEFEEADTPEK |
| | | LRTLLAEKLSSRPEAVHEYVTPLFVSRAPNRKMSGAHKDTLRSAKRFVKHNEKIS |
| | | VKRVWLTEIKLADLENMVNYKNGREIELYEALKARLEAYGGNAKQAFDPKDNPFY |
| | | KKGGQLVKAVRVEKTQESGVLLNKKNAYTIADNGDMVRVDVFCKVDKKGKNQYFI |
| | | VPIYAWQVAENILPDIDCKGYRIDDSYTFCFSLHKYDLIAFQKDEKSKVEFAYYI |
| | | NCDSSNGRFYLAWHDKGSKEQQFRISTQNLVLIQKYQVNELGKEIRPCRLKKRPP |
| | | VRSGKRTADGSGGGSPAAKKKKLD |
| 614 | Amino acid | MDGSGGGSPKKKRKVEDKRPAATKKAGQAKKKKGGSGGGAAFKPNPINYILGLDI |
| | sequence for | GIASVGWAMVEIDEEENPIRLIDLGVRVFERAEVPKTGDSLAMARRLARSVRRLT |
| | Nme2Cas9 | RRRAHRLLRARRLLKREGVLQAADEDENGLIKSLPNTPWQLRAAALDRKLTPLEW |
| | encoded | SAVLLHLIKHRGYLSQRKNEGETADKELGALLKGVANNAHALQTGDERTPAELAL |
| | by mRNA O | NKFEKESGHIRNQRGDYSHTFSRKDLQAELILLFEKQKEFGNPHVSGGLKEGIET |
| | | LLMTQRPALSGDAVQKMLGHCTFEPAEPKAAKNTYTAERFIWLTKLNNLRILEQG |
| | | SERPLTDTERATLMDEPYRKSKLTYAQARKLLGLEDTAFFKGLRYGKDNAEASTL |
| | | MEMKAYHAISRALEKEGLKDKKSPLNLSSELQDEIGTAFSLFKTDEDITGRLKDR |
| | | VQPEILEALLKHISFDKFVQISLKALRRIVPLMEQGKRYDEACAEIYGDHYGKKN |
| | | TEEKIYLPPIPADEIRNPVVLRALSQARKVINGVVRRYGSPARIHIETAREVGKS |
| | | FKDRKEIEKRQEENRKDREKAAAKFREYFPNFVGEPKSKDILKLRLYEQQHGKCL |
| | | YSGKEINLVRLNEKGYVEIDHALPFSRTWDDSENNKVLVLGSENQNKGNQTPYEY |
| | | ENGKDNSREWQEFKARVETSRFPRSKKQRILLQKFDEDGFKECNLNDTRYVNRFL |
| | | CQFVADHILLTGKGKRRVFASNGQITNLLRGFWGLRKVRAENDRHHALDAVVVAC |
| | | STVAMQQKITRFVRYKEMNAFDGKTIDKETGKVLHQKTHFPQPWEFFAQEVMIRV |
| | | FGKPDGKPEFEEADTPEKLRTLLAEKLSSRPEAVHEYVTPLFVSRAPNRKMSGAH |
| | | KDTLRSAKRFVKHNEKISVKRVWLTEIKLADLENMVNYKNGREIELYEALKARLE |
| | | AYGGNAKQAFDPKDNPFYKKGGQLVKAVRVEKTQESGVLLNKKNAYTIADNGDMV |
| | | RVDVFCKVDKKGKNQYFIVPIYAWQVAENILPDIDCKGYRIDDSYTFCFSLHKYD |
| | | LIAFQKDEKSKVEFAYYINCDSSNGRFYLAWHDKGSKEQQFRISTQNLVLIQKYQ |
| | | VNELGKEIRPCRLKKRPPVR |
| 615 | Amino acid | MDGSGGGSPKKKRKVEDKRPAATKKAGQAKKKKGGSGGGAAFKPNPINYILGLDI |
| | sequence for | GIASVGWAMVEIDEEENPIRLIDLGVRVFERAEVPKTGDSLAMARRLARSVRRLT |
| | Nme2Cas9 with | RRRAHRLLRARRLLKREGVLQAADEDENGLIKSLPNTPWQLRAAALDRKLTPLEW |
| | HiBiT tag | SAVLLHLIKHRGYLSQRKNEGETADKELGALLKGVANNAHALQTGDERTPAELAL |
| | encoded by mRNA | NKFEKESGHIRNQRGDYSHTFSRKDLQAELILLFEKQKEFGNPHVSGGLKEGIET |
| | P | LLMTQRPALSGDAVQKMLGHCTFEPAEPKAAKNTYTAERFIWLTKLNNLRILEQG |
| | | SERPLTDTERATLMDEPYRKSKLTYAQARKLLGLEDTAFFKGLRYGKDNAEASTL |
| | | MEMKAYHAISRALEKEGLKDKKSPLNLSSELQDEIGTAFSLFKTDEDITGRLKDR |
| | | VQPEILEALLKHISFDKFVQISLKALRRIVPLMEQGKRYDEACAEIYGDHYGKKN |
| | | TEEKIYLPPIPADEIRNPVVLRALSQARKVINGVVRRYGSPARIHIETAREVGKS |
| | | FKDRKEIEKRQEENRKDREKAAAKFREYFPNFVGEPKSKDILKLRLYEQQHGKCL |
| | | YSGKEINLVRLNEKGYVEIDHALPESRTWDDSENNKVLVLGSENQNKGNQTPYEY |
| | | ENGKDNSREWQEFKARVETSRFPRSKKQRILLQKFDEDGFKECNLNDTRYVNRFL |
| | | CQFVADHILLTGKGKRRVFASNGQITNLLRGFWGLRKVRAENDRHHALDAVVVAC |
| | | STVAMQQKITRFVRYKEMNAFDGKTIDKETGKVLHQKTHFPQPWEFFAQEVMIRV |
| | | FGKPDGKPEFEEADTPEKLRTLLAEKLSSRPEAVHEYVTPLFVSRAPNRKMSGAH |
| | | KDTLRSAKRFVKHNEKISVKRVWLTEIKLADLENMVNYKNGREIELYEALKARLE |
| | | AYGGNAKQAFDPKDNPFYKKGGQLVKAVRVEKTQESGVLLNKKNAYTIADNGDMV |
| | | RVDVFCKVDKKGKNQYFIVPIYAWQVAENILPDIDCKGYRIDDSYTFCFSLHKYD |
| | | LIAFQKDEKSKVEFAYYINCDSSNGRFYLAWHDKGSKEQQFRISTQNLVLIQKYQ |
| | | VNELGKEIRPCRLKKRPPVRSESATPESVSGWRLFKKIS |
| 616 | Amino acid | MDGSGGGSEDKRPAATKKAGQAKKKKGGSGGGAAFKPNPINYILGLDIGIASVGW |
| | sequence for | AMVEIDEEENPIRLIDLGVRVFERAEVPKTGDSLAMARRLARSVRRLTRRRAHRL |
| | Nme2Cas9 | LRARRLLKREGVLQAADEDENGLIKSLPNTPWQLRAAALDRKLTPLEWSAVLLHL |
| | encoded | IKHRGYLSQRKNEGETADKELGALLKGVANNAHALQTGDFRTPAELALNKFEKES |
| | by mRNA Q | GHIRNQRGDYSHTFSRKDLQAELILLFEKQKEFGNPHVSGGLKEGIETLLMTQRP |
| | | ALSGDAVQKMLGHCTFEPAEPKAAKNTYTAERFIWLTKLNNLRILEQGSERPLTD |
| | | TERATLMDEPYRKSKLTYAQARKLLGLEDTAFFKGLRYGKDNAEASTLMEMKAYH |
| | | AISRALEKEGLKDKKSPLNLSSELQDEIGTAFSLEKTDEDITGRLKDRVQPEILE |
| | | ALLKHISFDKFVQISLKALRRIVPLMEQGKRYDEACAEIYGDHYGKKNTEEKIYL |
| | | PPIPADEIRNPVVLRALSQARKVINGVVRRYGSPARIHIETAREVGKSFKDRKEI |
| | | EKRQEENRKDREKAAAKFREYFPNFVGEPKSKDILKLRLYEQQHGKCLYSGKEIN |
| | | LVRLNEKGYVEIDHALPFSRTWDDSFNNKVLVLGSENQNKGNQTPYEYFNGKDNS |
| | | REWQEFKARVETSRFPRSKKQRILLQKFDEDGEKECNLNDTRYVNRFLCQFVADH |
| | | ILLTGKGKRRVFASNGQITNLLRGFWGLRKVRAENDRHHALDAVVVACSTVAMQQ |
| | | KITRFVRYKEMNAFDGKTIDKETGKVLHQKTHFPQPWEFFAQEVMIRVEGKPDGK |
| | | PEFEEADTPEKLRTLLAEKLSSRPEAVHEYVTPLFVSRAPNRKMSGAHKDTLRSA |
| | | KRFVKHNEKISVKRVWLTEIKLADLENMVNYKNGREIELYEALKARLEAYGGNAK |
| | | QAFDPKDNPFYKKGGQLVKAVRVEKTQESGVLLNKKNAYTIADNGDMVRVDVFCK |
| | | VDKKGKNQYFIVPIYAWQVAENILPDIDCKGYRIDDSYTFCFSLHKYDLIAFQKD |
| | | EKSKVEFAYYINCDSSNGRFYLAWHDKGSKEQQFRISTQNLVLIQKYQVNELGKE |
| | | IRPCRLKKRPPVR |
| 617 | Amino acid | MDGSGGGSPKKKRKVEDKRPAATKKAGQAKKKKGGSGGGEASPASGPRHLMDPHI |
| | sequence for | FTSNENNGIGRHKTYLCYEVERLDNGTSVKMDQHRGFLHNQAKNLLCGFYGRHAE |
| | Nme2Cas9 base | LRFLDLVPSLQLDPAQIYRVTWFISWSPCFSWGCAGEVRAFLQENTHVRLRIFAA |
| | editor encoded | RIYDYDPLYKEALQMLRDAGAQVSIMTYDEFKHCWDTFVDHQGCPFQPWDGLDEH |
| | by mRNA R | SQALSGRLRAILQNQGNSGSETPGTSESATPESAAFKPNPINYILGLAIGIASVG |
| | | WAMVEIDEEENPIRLIDLGVRVFERAEVPKTGDSLAMARRLARSVRRLTRRRAHR |
| | | LLRARRLLKREGVLQAADFDENGLIKSLPNTPWQLRAAALDRKLTPLEWSAVLLH |
| | | LIKHRGYLSQRKNEGETADKELGALLKGVANNAHALQTGDFRTPAELALNKFEKE |
| | | SGHIRNQRGDYSHTFSRKDLQAELILLFEKQKEFGNPHVSGGLKEGIETLLMTQR |
| | | PALSGDAVQKMLGHCTFEPAEPKAAKNTYTAERFIWLTKLNNLRILEQGSERPLT |
| | | DTERATLMDEPYRKSKLTYAQARKLLGLEDTAFFKGLRYGKDNAEASTLMEMKAY |
| | | HAISRALEKEGLKDKKSPLNLSSELQDEIGTAFSLEKTDEDITGRLKDRVQPEIL |
| | | EALLKHISFDKFVQISLKALRRIVPLMEQGKRYDEACAEIYGDHYGKKNTEEKIY |
| | | LPPIPADEIRNPVVLRALSQARKVINGVVRRYGSPARIHIETAREVGKSFKDRKE |
| | | IEKRQEENRKDREKAAAKFREYFPNFVGEPKSKDILKLRLYEQQHGKCLYSGKEI |
| | | NLVRLNEKGYVEIDHALPESRTWDDSFNNKVLVLGSENQNKGNQTPYEYENGKDN |
| | | SREWQEFKARVETSRFPRSKKQRILLQKFDEDGEKECNLNDTRYVNRFLCQFVAD |
| | | HILLTGKGKRRVFASNGQITNLLRGFWGLRKVRAENDRHHALDAVVVACSTVAMQ |
| | | QKITRFVRYKEMNAFDGKTIDKETGKVLHQKTHFPQPWEFFAQEVMIRVFGKPDG |
| | | KPEFEEADTPEKLRTLLAEKLSSRPEAVHEYVTPLFVSRAPNRKMSGAHKDTLRS |
| | | AKRFVKHNEKISVKRVWLTEIKLADLENMVNYKNGREIELYEALKARLEAYGGNA |
| | | KQAFDPKDNPFYKKGGQLVKAVRVEKTQESGVLLNKKNAYTIADNGDMVRVDVFC |
| | | KVDKKGKNQYFIVPIYAWQVAENILPDIDCKGYRIDDSYTFCFSLHKYDLIAFQK |
| | | DEKSKVEFAYYINCDSSNGRFYLAWHDKGSKEQQFRISTQNLVLIQKYQVNELGK |
| | | EIRPCRLKKRPPVRSGKRTADGSEFESPKKKRKVE |
| 618 | Amino acid | MDGSGGGSPKKKRKVEDKRPAATKKAGQAKKKKGGSGGGEASPASGPRHLMDPHI |
| | sequence for | FTSNENNGIGRHKTYLCYEVERLDNGTSVKMDQHRGFLHNQAKNLLCGFYGRHAE |
| | Nme2Cas9 base | LRFLDLVPSLQLDPAQIYRVTWFISWSPCESWGCAGEVRAFLQENTHVRLRIFAA |
| | editor encoded | RIYDYDPLYKEALQMLRDAGAQVSIMTYDEFKHCWDTFVDHQGCPFQPWDGLDEH |
| | by mRNA S | SQALSGRLRAILQNQGNSGSETPGTSESATPESAAFKPNPINYILGLAIGIASVG |
| | | WAMVEIDEEENPIRLIDLGVRVFERAEVPKTGDSLAMARRLARSVRRLTRRRAHR |
| | | LLRARRLLKREGVLQAADFDENGLIKSLPNTPWQLRAAALDRKLTPLEWSAVLLH |
| | | LIKHRGYLSQRKNEGETADKELGALLKGVANNAHALQTGDFRTPAELALNKFEKE |
| | | SGHIRNQRGDYSHTFSRKDLQAELILLFEKQKEFGNPHVSGGLKEGIETLLMTQR |
| | | PALSGDAVQKMLGHCTFEPAEPKAAKNTYTAERFIWLTKLNNLRILEQGSERPLT |
| | | DTERATLMDEPYRKSKLTYAQARKLLGLEDTAFFKGLRYGKDNAEASTLMEMKAY |
| | | HAISRALEKEGLKDKKSPLNLSSELQDEIGTAFSLFKTDEDITGRLKDRVQPEIL |
| | | EALLKHISFDKFVQISLKALRRIVPLMEQGKRYDEACAEIYGDHYGKKNTEEKIY |
| | | LPPIPADEIRNPVVLRALSQARKVINGVVRRYGSPARIHIETAREVGKSFKDRKE |
| | | IEKRQEENRKDREKAAAKFREYFPNFVGEPKSKDILKLRLYEQQHGKCLYSGKEI |
| | | NLVRLNEKGYVEIDHALPFSRTWDDSFNNKVLVLGSENQNKGNQTPYEYFNGKDN |
| | | SREWQEFKARVETSRFPRSKKQRILLQKFDEDGFKECNLNDTRYVNRFLCQFVAD |
| | | HILLTGKGKRRVFASNGQITNLLRGFWGLRKVRAENDRHHALDAVVVACSTVAMQ |
| | | QKITRFVRYKEMNAFDGKTIDKETGKVLHQKTHFPQPWEFFAQEVMIRVFGKPDG |
| | | KPEFEEADTPEKLRTLLAEKLSSRPEAVHEYVTPLFVSRAPNRKMSGAHKDTLRS |
| | | AKRFVKHNEKISVKRVWLTEIKLADLENMVNYKNGREIELYEALKARLEAYGGNA |
| | | KQAFDPKDNPFYKKGGQLVKAVRVEKTQESGVLLNKKNAYTIADNGDMVRVDVFC |
| | | KVDKKGKNQYFIVPIYAWQVAENILPDIDCKGYRIDDSYTFCFSLHKYDLIAFQK |
| | | DEKSKVEFAYYINCDSSNGRFYLAWHDKGSKEQQFRISTQNLVLIQKYQVNELGK |
| | | EIRPCRLKKRPPVR |
| 619 | Amino acid | MEASPASGPRHLMDPHIFTSNENNGIGRHKTYLCYEVERLDNGTSVKMDQHRGEL |
| | sequence for | HNQAKNLLCGFYGRHAELRFLDLVPSLQLDPAQIYRVTWFISWSPCFSWGCAGEV |
| | Nme2Cas9 base | RAFLQENTHVRLRIFAARIYDYDPLYKEALQMLRDAGAQVSIMTYDEFKHCWDTF |
| | editor encoded | VDHQGCPFQPWDGLDEHSQALSGRLRAILQNQGNSGSETPGTSESATPESAAFKP |
| | by mRNA T | NPINYILGLAIGIASVGWAMVEIDEEENPIRLIDLGVRVFERAEVPKTGDSLAMA |
| | | RRLARSVRRLTRRRAHRLLRARRLLKREGVLQAADFDENGLIKSLPNTPWQLRAA |
| | | ALDRKLTPLEWSAVLLHLIKHRGYLSQRKNEGETADKELGALLKGVANNAHALQT |
| | | GDFRTPAELALNKFEKESGHIRNQRGDYSHTFSRKDLQAELILLFEKQKEFGNPH |
| | | VSGGLKEGIETLLMTQRPALSGDAVQKMLGHCTFEPAEPKAAKNTYTAERFIWLT |
| | | KLNNLRILEQGSERPLTDTERATLMDEPYRKSKLTYAQARKLLGLEDTAFFKGLR |
| | | YGKDNAEASTLMEMKAYHAISRALEKEGLKDKKSPLNLSSELQDEIGTAFSLFKT |
| | | DEDITGRLKDRVQPEILEALLKHISFDKFVQISLKALRRIVPLMEQGKRYDEACA |
| | | EIYGDHYGKKNTEEKIYLPPIPADEIRNPVVLRALSQARKVINGVVRRYGSPARI |
| | | HIETAREVGKSFKDRKEIEKRQEENRKDREKAAAKFREYEPNFVGEPKSKDILKL |
| | | RLYEQQHGKCLYSGKEINLVRLNEKGYVEIDHALPFSRTWDDSFNNKVLVLGSEN |
| | | QNKGNQTPYEYENGKDNSREWQEFKARVETSRFPRSKKQRILLQKFDEDGFKECN |
| | | LNDTRYVNRFLCQFVADHILLTGKGKRRVFASNGQITNLLRGFWGLRKVRAENDR |
| | | HHALDAVVVACSTVAMQQKITRFVRYKEMNAFDGKTIDKETGKVLHQKTHFPQPW |
| | | EFFAQEVMIRVFGKPDGKPEFEEADTPEKLRTLLAEKLSSRPEAVHEYVTPLFVS |
| | | RAPNRKMSGAHKDTLRSAKRFVKHNEKISVKRVWLTEIKLADLENMVNYKNGREI |
| | | ELYEALKARLEAYGGNAKQAFDPKDNPFYKKGGQLVKAVRVEKTQESGVLLNKKN |
| | | AYTIADNGDMVRVDVFCKVDKKGKNQYFIVPIYAWQVAENILPDIDCKGYRIDDS |
| | | YTFCFSLHKYDLIAFQKDEKSKVEFAYYINCDSSNGRFYLAWHDKGSKEQQFRIS |
| | | TQNLVLIQKYQVNELGKEIRPCRLKKRPPVRSGKRTADGSEFESPKKKRKVE |
| 620 | Amino acid | MKLGSIEFIKVNKGSGSGSGAPESATESGGTSTESEGSAGTSTESEGSAGSAGST |
| | sequence for | STEEGTSTESEGSAGTSTESEGSAGTSESATESGGTSTESEGSSSTGAAFKPNPI |
| | Nme2Cas9 | NYILGLDIGIASVGWAMVEIDEEENPIRLIDLGVRVFERAEVPKTGDSLAMARRL |
| | encoded | ARSVRRLTRRRAHRLLRARRLLKREGVLQAADFDENGLIKSLPNTPWQLRAAALD |
| | by mRNA U | RKLTPLEWSAVLLHLIKHRGYLSQRKNEGETADKELGALLKGVANNAHALQTGDF |
| | | RTPAELALNKFEKESGHIRNQRGDYSHTFSRKDLQAELILLFEKQKEFGNPHVSG |
| | | GLKEGIETLLMTQRPALSGDAVQKMLGHCTFEPAEPKAAKNTYTAERFIWLTKLN |
| | | NLRILEQGSERPLTDTERATLMDEPYRKSKLTYAQARKLLGLEDTAFFKGLRYGK |
| | | DNAEASTLMEMKAYHAISRALEKEGLKDKKSPLNLSSELQDEIGTAFSLEKTDED |
| | | ITGRLKDRVQPEILEALLKHISFDKFVQISLKALRRIVPLMEQGKRYDEACAEIY |
| | | GDHYGKKNTEEKIYLPPIPADEIRNPVVLRALSQARKVINGVVRRYGSPARIHIE |
| | | TAREVGKSFKDRKEIEKRQEENRKDREKAAAKFREYFPNFVGEPKSKDILKLRLY |
| | | EQQHGKCLYSGKEINLVRLNEKGYVEIDHALPFSRTWDDSFNNKVLVLGSENQNK |
| | | GNQTPYEYENGKDNSREWQEFKARVETSRFPRSKKQRILLQKFDEDGFKECNLND |
| | | TRYVNRFLCQFVADHILLTGKGKRRVFASNGQITNLLRGFWGLRKVRAENDRHHA |
| | | LDAVVVACSTVAMQQKITREVRYKEMNAFDGKTIDKETGKVLHQKTHFPQPWEFF |
| | | AQEVMIRVFGKPDGKPEFEEADTPEKLRTLLAEKLSSRPEAVHEYVTPLFVSRAP |
| | | NRKMSGAHKDTLRSAKRFVKHNEKISVKRVWLTEIKLADLENMVNYKNGREIELY |
| | | EALKARLEAYGGNAKQAFDPKDNPFYKKGGQLVKAVRVEKTQESGVLLNKKNAYT |
| | | IADNGDMVRVDVFCKVDKKGKNQYFIVPIYAWQVAENILPDIDCKGYRIDDSYTF |
| | | CFSLHKYDLIAFQKDEKSKVEFAYYINCDSSNGRFYLAWHDKGSKEQQFRISTQN |
| | | LVLIQKYQVNELGKEIRPCRLKKRPPVRSGKRTADGSEFESPKKKRKVE |
| 621 | mRNA B encoding | GGGAAGCUCAGAAUAAACGCUCAACUUUGGCCGGAUCUGCCACCAUGACCGGUGC |
| | Nme2Cas 9 | CGCCUUCAAGCCCAACCCCAUCAACUACAUCCUGGGCCUGGACAUCGGCAUCGCC |
| | | UCCGUGGGCUGGGCCAUGGUGGAGAUCGACGAGGAGGAGAACCCCAUCCGGCUGA |
| | | UCGACCUGGGCGUGCGGGUGUUCGAGCGGGCCGAGGUGCCCAAGACCGGCGACUC |
| | | CCUGGCCAUGGCCCGGCGGCUGGCCCGGUCCGUGCGGCGGCUGACCCGGCGGCGG |
| | | GCCCACCGGCUGCUGCGGGCCCGGCGGCUGCUGAAGCGGGAGGGCGUGCUGCAGG |
| | | CCGCCGACUUCGACGAGAACGGCCUGAUCAAGUCCCUGCCCAACACCCCCUGGCA |
| | | GCUGCGGGCCGCCGCCCUGGACCGGAAGCUGACCCCCCUGGAGUGGUCCGCCGUG |
| | | CUGCUGCACCUGAUCAAGCACCGGGGCUACCUGUCCCAGCGGAAGAACGAGGGCG |
| | | AGACCGCCGACAAGGAGCUGGGCGCCCUGCUGAAGGGCGUGGCCAACAACGCCCA |
| | | CGCCCUGCAGACCGGCGACUUCCGGACCCCCGCCGAGCUGGCCCUGAACAAGUUC |
| | | GAGAAGGAGUCCGGCCACAUCCGGAACCAGCGGGGCGACUACUCCCACACCUUCU |
| | | CCCGGAAGGACCUGCAGGCCGAGCUGAUCCUGCUGUUCGAGAAGCAGAAGGAGUU |
| | | CGGCAACCCCCACGUGUCCGGCGGCCUGAAGGAGGGCAUCGAGACCCUGCUGAUG |
| | | ACCCAGCGGCCCGCCCUGUCCGGCGACGCCGUGCAGAAGAUGCUGGGCCACUGCA |
| | | CCUUCGAGCCCGCCGAGCCCAAGGCCGCCAAGAACACCUACACCGCCGAGCGGUU |
| | | CAUCUGGCUGACCAAGCUGAACAACCUGCGGAUCCUGGAGCAGGGCUCCGAGCGG |
| | | CCCCUGACCGACACCGAGCGGGCCACCCUGAUGGACGAGCCCUACCGGAAGUCCA |
| | | AGCUGACCUACGCCCAGGCCCGGAAGCUGCUGGGCCUGGAGGACACCGCCUUCUU |
| | | CAAGGGCCUGCGGUACGGCAAGGACAACGCCGAGGCCUCCACCCUGAUGGAGAUG |
| | | AAGGCCUACCACGCCAUCUCCCGGGCCCUGGAGAAGGAGGGCCUGAAGGACAAGA |
| | | AGUCCCCCCUGAACCUGUCCUCCGAGCUGCAGGACGAGAUCGGCACCGCCUUCUC |
| | | CCUGUUCAAGACCGACGAGGACAUCACCGGCCGGCUGAAGGACCGGGUGCAGCCC |
| | | GAGAUCCUGGAGGCCCUGCUGAAGCACAUCUCCUUCGACAAGUUCGUGCAGAUCU |
| | | CCCUGAAGGCCCUGCGGCGGAUCGUGCCCCUGAUGGAGCAGGGCAAGCGGUACGA |
| | | CGAGGCCUGCGCCGAGAUCUACGGCGACCACUACGGCAAGAAGAACACCGAGGAG |
| | | AAGAUCUACCUGCCCCCCAUCCCCGCCGACGAGAUCCGGAACCCCGUGGUGCUGC |
| | | GGGCCCUGUCCCAGGCCCGGAAGGUGAUCAACGGCGUGGUGCGGCGGUACGGCUC |
| | | CCCCGCCCGGAUCCACAUCGAGACCGCCCGGGAGGUGGGCAAGUCCUUCAAGGAC |
| | | CGGAAGGAGAUCGAGAAGCGGCAGGAGGAGAACCGGAAGGACCGGGAGAAGGCCG |
| | | CCGCCAAGUUCCGGGAGUACUUCCCCAACUUCGUGGGCGAGCCCAAGUCCAAGGA |
| | | CAUCCUGAAGCUGCGGCUGUACGAGCAGCAGCACGGCAAGUGCCUGUACUCCGGC |
| | | AAGGAGAUCAACCUGGUGCGGCUGAACGAGAAGGGCUACGUGGAGAUCGACCACG |
| | | CCCUGCCCUUCUCCCGGACCUGGGACGACUCCUUCAACAACAAGGUGCUGGUGCU |
| | | GGGCUCCGAGAACCAGAACAAGGGCAACCAGACCCCCUACGAGUACUUCAACGGC |
| | | AAGGACAACUCCCGGGAGUGGCAGGAGUUCAAGGCCCGGGUGGAGACCUCCCGGU |
| | | UCCCCCGGUCCAAGAAGCAGCGGAUCCUGCUGCAGAAGUUCGACGAGGACGGCUU |
| | | CAAGGAGUGCAACCUGAACGACACCCGGUACGUGAACCGCUUCCUGUGCCAGUUC |
| | | GUGGCCGACCACAUCCUGCUGACCGGCAAGGGCAAGCGGCGGGUGUUCGCCUCCA |
| | | ACGGCCAGAUCACCAACCUGCUGCGGGGCUUCUGGGGCCUGCGGAAGGUGCGGGC |
| | | CGAGAACGACCGGCACCACGCCCUGGACGCCGUGGUGGUGGCCUGCUCCACCGUG |
| | | GCCAUGCAGCAGAAGAUCACCCGGUUCGUGCGGUACAAGGAGAUGAACGCCUUCG |
| | | ACGGCAAGACCAUCGACAAGGAGACCGGCAAGGUGCUGCACCAGAAGACCCACUU |
| | | CCCCCAGCCCUGGGAGUUCUUCGCCCAGGAGGUGAUGAUCCGGGUGUUCGGCAAG |
| | | CCCGACGGCAAGCCCGAGUUCGAGGAGGCCGACACCCCCGAGAAGCUGCGGACCC |
| | | UGCUGGCCGAGAAGCUGUCCUCCCGGCCCGAGGCCGUGCACGAGUACGUGACCCC |
| | | CCUGUUCGUGUCCCGGGCCCCCAACCGGAAGAUGUCCGGCGCCCACAAGGACACC |
| | | CUGCGGUCCGCCAAGCGGUUCGUGAAGCACAACGAGAAGAUCUCCGUGAAGCGGG |
| | | UGUGGCUGACCGAGAUCAAGCUGGCCGACCUGGAGAACAUGGUGAACUACAAGAA |
| | | CGGCCGGGAGAUCGAGCUGUACGAGGCCCUGAAGGCCCGGCUGGAGGCCUACGGC |
| | | GGCAACGCCAAGCAGGCCUUCGACCCCAAGGACAACCCCUUCUACAAGAAGGGCG |
| | | GCCAGCUGGUGAAGGCCGUGCGGGUGGAGAAGACCCAGGAGUCCGGCGUGCUGCU |
| | | GAACAAGAAGAACGCCUACACCAUCGCCGACAACGGCGACAUGGUGCGGGUGGAC |
| | | GUGUUCUGCAAGGUGGACAAGAAGGGCAAGAACCAGUACUUCAUCGUGCCCAUCU |
| | | ACGCCUGGCAGGUGGCCGAGAACAUCCUGCCCGACAUCGACUGCAAGGGCUACCG |
| | | GAUCGACGACUCCUACACCUUCUGCUUCUCCCUGCACAAGUACGACCUGAUCGCC |
| | | UUCCAGAAGGACGAGAAGUCCAAGGUGGAGUUCGCCUACUACAUCAACUGCGACU |
| | | CCUCCAACGGCCGGUUCUACCUGGCCUGGCACGACAAGGGCUCCAAGGAGCAGCA |
| | | GUUCCGGAUCUCCACCCAGAACCUGGUGCUGAUCCAGAAGUACCAGGUGAACGAG |
| | | CUGGGCAAGGAGAUCCGGCCCUGCCGGCUGAAGAAGCGGCCCCCCGUGCGGUCCG |
| | | GAAAGCGGACCGCCGACGGCUCCGAGUUCGAGUCCCCCAAGAAGAAGCGGAAGGU |
| | | GGAGUAGCUAGCACCAGCCUCAAGAACACCCGAAUGGAGUCUCUAAGCUACAUAA |
| | | UACCAACUUACACUUUACAAAAUGUUGUCCCCCAAAAUGUAGCCAUUCGUAUCUG |
| | | CUCCUAAUAAAAAGAAAGUUUCUUCACAUUCUCUCGAGAAAAAAAAAAAAUGGAA |
| | | AAAAAAAAAACGGAAAAAAAAAAAAGGUAAAAAAAAAAAAUAUAAAAAAAAAAAA |
| | | CAUAAAAAAAAAAAACGAAAAAAAAAAAACGUAAAAAAAAAAAACUCAAAAAAAA |
| | | AAAAGAUAAAAAAAAAAAACCUAAAAAAAAAAAAUGUAAAAAAAAAAAAUCUAG |
| 622 | mRNA C encoding | GGGAAGCUCAGAAUAAACGCUCAACUUUGGCCGGAUCUGCCACCAUGACCGGUGC |
| | Nme2Cas 9 | CGCCUUCAAGCCCAACCCCAUCAACUACAUCCUGGGCCUGGACAUCGGCAUCGCC |
| | | UCCGUGGGCUGGGCCAUGGUGGAGAUCGACGAGGAGGAGAACCCCAUCCGGCUGA |
| | | UCGACCUGGGCGUGCGGGUGUUCGAGCGGGCCGAGGUGCCCAAGACCGGCGACUC |
| | | CCUGGCCAUGGCCCGGCGGCUGGCCCGGUCCGUGCGGCGGCUGACCCGGCGGCGG |
| | | GCCCACCGGCUGCUGCGGGCCCGGCGGCUGCUGAAGCGGGAGGGCGUGCUGCAGG |
| | | CCGCCGACUUCGACGAGAACGGCCUGAUCAAGUCCCUGCCCAACACCCCCUGGCA |
| | | GCUGCGGGCCGCCGCCCUGGACCGGAAGCUGACCCCCCUGGAGUGGUCCGCCGUG |
| | | CUGCUGCACCUGAUCAAGCACCGGGGCUACCUGUCCCAGCGGAAGAACGAGGGCG |
| | | AGACCGCCGACAAGGAGCUGGGCGCCCUGCUGAAGGGCGUGGCCAACAACGCCCA |
| | | CGCCCUGCAGACCGGCGACUUCCGGACCCCCGCCGAGCUGGCCCUGAACAAGUUC |
| | | GAGAAGGAGUCCGGCCACAUCCGGAACCAGCGGGGCGACUACUCCCACACCUUCU |
| | | CCCGGAAGGACCUGCAGGCCGAGCUGAUCCUGCUGUUCGAGAAGCAGAAGGAGUU |
| | | CGGCAACCCCCACGUGUCCGGCGGCCUGAAGGAGGGCAUCGAGACCCUGCUGAUG |
| | | ACCCAGCGGCCCGCCCUGUCCGGCGACGCCGUGCAGAAGAUGCUGGGCCACUGCA |
| | | CCUUCGAGCCCGCCGAGCCCAAGGCCGCCAAGAACACCUACACCGCCGAGCGGUU |
| | | CAUCUGGCUGACCAAGCUGAACAACCUGCGGAUCCUGGAGCAGGGCUCCGAGCGG |
| | | CCCCUGACCGACACCGAGCGGGCCACCCUGAUGGACGAGCCCUACCGGAAGUCCA |
| | | AGCUGACCUACGCCCAGGCCCGGAAGCUGCUGGGCCUGGAGGACACCGCCUUCUU |
| | | CAAGGGCCUGCGGUACGGCAAGGACAACGCCGAGGCCUCCACCCUGAUGGAGAUG |
| | | AAGGCCUACCACGCCAUCUCCCGGGCCCUGGAGAAGGAGGGCCUGAAGGACAAGA |
| | | AGUCCCCCCUGAACCUGUCCUCCGAGCUGCAGGACGAGAUCGGCACCGCCUUCUC |
| | | CCUGUUCAAGACCGACGAGGACAUCACCGGCCGGCUGAAGGACCGGGUGCAGCCC |
| | | GAGAUCCUGGAGGCCCUGCUGAAGCACAUCUCCUUCGACAAGUUCGUGCAGAUCU |
| | | CCCUGAAGGCCCUGCGGCGGAUCGUGCCCCUGAUGGAGCAGGGCAAGCGGUACGA |
| | | CGAGGCCUGCGCCGAGAUCUACGGCGACCACUACGGCAAGAAGAACACCGAGGAG |
| | | AAGAUCUACCUGCCCCCCAUCCCCGCCGACGAGAUCCGGAACCCCGUGGUGCUGC |
| | | GGGCCCUGUCCCAGGCCCGGAAGGUGAUCAACGGCGUGGUGCGGCGGUACGGCUC |
| | | CCCCGCCCGGAUCCACAUCGAGACCGCCCGGGAGGUGGGCAAGUCCUUCAAGGAC |
| | | CGGAAGGAGAUCGAGAAGCGGCAGGAGGAGAACCGGAAGGACCGGGAGAAGGCCG |
| | | CCGCCAAGUUCCGGGAGUACUUCCCCAACUUCGUGGGCGAGCCCAAGUCCAAGGA |
| | | CAUCCUGAAGCUGCGGCUGUACGAGCAGCAGCACGGCAAGUGCCUGUACUCCGGC |
| | | AAGGAGAUCAACCUGGUGCGGCUGAACGAGAAGGGCUACGUGGAGAUCGACCACG |
| | | CCCUGCCCUUCUCCCGGACCUGGGACGACUCCUUCAACAACAAGGUGCUGGUGCU |
| | | GGGCUCCGAGAACCAGAACAAGGGCAACCAGACCCCCUACGAGUACUUCAACGGC |
| | | AAGGACAACUCCCGGGAGUGGCAGGAGUUCAAGGCCCGGGUGGAGACCUCCCGGU |
| | | UCCCCCGGUCCAAGAAGCAGCGGAUCCUGCUGCAGAAGUUCGACGAGGACGGCUU |
| | | CAAGGAGUGCAACCUGAACGACACCCGGUACGUGAACCGCUUCCUGUGCCAGUUC |
| | | GUGGCCGACCACAUCCUGCUGACCGGCAAGGGCAAGCGGCGGGUGUUCGCCUCCA |
| | | ACGGCCAGAUCACCAACCUGCUGCGGGGCUUCUGGGGCCUGCGGAAGGUGCGGGC |
| | | CGAGAACGACCGGCACCACGCCCUGGACGCCGUGGUGGUGGCCUGCUCCACCGUG |
| | | GCCAUGCAGCAGAAGAUCACCCGGUUCGUGCGGUACAAGGAGAUGAACGCCUUCG |
| | | ACGGCAAGACCAUCGACAAGGAGACCGGCAAGGUGCUGCACCAGAAGACCCACUU |
| | | CCCCCAGCCCUGGGAGUUCUUCGCCCAGGAGGUGAUGAUCCGGGUGUUCGGCAAG |
| | | CCCGACGGCAAGCCCGAGUUCGAGGAGGCCGACACCCCCGAGAAGCUGCGGACCC |
| | | UGCUGGCCGAGAAGCUGUCCUCCCGGCCCGAGGCCGUGCACGAGUACGUGACCCC |
| | | CCUGUUCGUGUCCCGGGCCCCCAACCGGAAGAUGUCCGGCGCCCACAAGGACACC |
| | | CUGCGGUCCGCCAAGCGGUUCGUGAAGCACAACGAGAAGAUCUCCGUGAAGCGGG |
| | | UGUGGCUGACCGAGAUCAAGCUGGCCGACCUGGAGAACAUGGUGAACUACAAGAA |
| | | CGGCCGGGAGAUCGAGCUGUACGAGGCCCUGAAGGCCCGGCUGGAGGCCUACGGC |
| | | GGCAACGCCAAGCAGGCCUUCGACCCCAAGGACAACCCCUUCUACAAGAAGGGCG |
| | | GCCAGCUGGUGAAGGCCGUGCGGGUGGAGAAGACCCAGGAGUCCGGCGUGCUGCU |
| | | GAACAAGAAGAACGCCUACACCAUCGCCGACAACGGCGACAUGGUGCGGGUGGAC |
| | | GUGUUCUGCAAGGUGGACAAGAAGGGCAAGAACCAGUACUUCAUCGUGCCCAUCU |
| | | ACGCCUGGCAGGUGGCCGAGAACAUCCUGCCCGACAUCGACUGCAAGGGCUACCG |
| | | GAUCGACGACUCCUACACCUUCUGCUUCUCCCUGCACAAGUACGACCUGAUCGCC |
| | | UUCCAGAAGGACGAGAAGUCCAAGGUGGAGUUCGCCUACUACAUCAACUGCGACU |
| | | CCUCCAACGGCCGGUUCUACCUGGCCUGGCACGACAAGGGCUCCAAGGAGCAGCA |
| | | GUUCCGGAUCUCCACCCAGAACCUGGUGCUGAUCCAGAAGUACCAGGUGAACGAG |
| | | CUGGGCAAGGAGAUCCGGCCCUGCCGGCUGAAGAAGCGGCCCCCCGUGCGGUCCG |
| | | GAAAGCGGACCGCCGACGGCUCCGAGUUCGAGUCCCCCAAGAAGAAGCGGAAGGU |
| | | GGAGUAGCUAGCACCAGCCUCAAGAACACCCGAAUGGAGUCUCUAAGCUACAUAA |
| | | UACCAACUUACACUUUACAAAAUGUUGUCCCCCAAAAUGUAGCCAUUCGUAUCUG |
| | | CUCCUAAUAAAAAGAAAGUUUCUUCACAUUCUCUCGAGAAAAAAAAAAAAUGGAA |
| | | AAAAAAAAAACGGAAAAAAAAAAAAGGUAAAAAAAAAAAAUAUAAAAAAAAAAAA |
| | | CAUAAAAAAAAAAAACGAAAAAAAAAAAACGUAAAAAAAAAAAACUCAAAAAAAA |
| | | AAAAGAUAAAAAAAAAAAACCUAAAAAAAAAAAAUGUAAAAAAAAAAAAGGGAAA |
| | | AAAAAAAAACGCAAAAAAAAAAAACACAAAAAAAAAAAAUGCAAAAAAAAAAAAU |
| | | CGAAAAAAAAAAAAUCUAAAAAAAAAAAACGAAAAAAAAAAAACCCAAAAAAAAA |
| | | AAAGACAAAAAAAAAAAAUAGAAAAAAAAAAAAGUUAAAAAA |
| 623 | mRNA D encoding | GGGAAGCUCAGAAUAAACGCUCAACUUUGGCCGGAUCUGCCACCAUGACCGGUGC |
| | Nme2Cas9 | CGCCUUCAAGCCCAACCCCAUCAACUACAUCCUGGGCCUGGACAUCGGCAUCGCC |
| | | UCCGUGGGCUGGGCCAUGGUGGAGAUCGACGAGGAGGAGAACCCCAUCCGGCUGA |
| | | UCGACCUGGGCGUGCGGGUGUUCGAGCGGGCCGAGGUGCCCAAGACCGGCGACUC |
| | | CCUGGCCAUGGCCCGGCGGCUGGCCCGGUCCGUGCGGCGGCUGACCCGGCGGCGG |
| | | GCCCACCGGCUGCUGCGGGCCCGGCGGCUGCUGAAGCGGGAGGGCGUGCUGCAGG |
| | | CCGCCGACUUCGACGAGAACGGCCUGAUCAAGUCCCUGCCCAACACCCCCUGGCA |
| | | GCUGCGGGCCGCCGCCCUGGACCGGAAGCUGACCCCCCUGGAGUGGUCCGCCGUG |
| | | CUGCUGCACCUGAUCAAGCACCGGGGCUACCUGUCCCAGCGGAAGAACGAGGGCG |
| | | AGACCGCCGACAAGGAGCUGGGCGCCCUGCUGAAGGGCGUGGCCAACAACGCCCA |
| | | CGCCCUGCAGACCGGCGACUUCCGGACCCCCGCCGAGCUGGCCCUGAACAAGUUC |
| | | GAGAAGGAGUCCGGCCACAUCCGGAACCAGCGGGGCGACUACUCCCACACCUUCU |
| | | CCCGGAAGGACCUGCAGGCCGAGCUGAUCCUGCUGUUCGAGAAGCAGAAGGAGUU |
| | | CGGCAACCCCCACGUGUCCGGCGGCCUGAAGGAGGGCAUCGAGACCCUGCUGAUG |
| | | ACCCAGCGGCCCGCCCUGUCCGGCGACGCCGUGCAGAAGAUGCUGGGCCACUGCA |
| | | CCUUCGAGCCCGCCGAGCCCAAGGCCGCCAAGAACACCUACACCGCCGAGCGGUU |
| | | CAUCUGGCUGACCAAGCUGAACAACCUGCGGAUCCUGGAGCAGGGCUCCGAGCGG |
| | | CCCCUGACCGACACCGAGCGGGCCACCCUGAUGGACGAGCCCUACCGGAAGUCCA |
| | | AGCUGACCUACGCCCAGGCCCGGAAGCUGCUGGGCCUGGAGGACACCGCCUUCUU |
| | | CAAGGGCCUGCGGUACGGCAAGGACAACGCCGAGGCCUCCACCCUGAUGGAGAUG |
| | | AAGGCCUACCACGCCAUCUCCCGGGCCCUGGAGAAGGAGGGCCUGAAGGACAAGA |
| | | AGUCCCCCCUGAACCUGUCCUCCGAGCUGCAGGACGAGAUCGGCACCGCCUUCUC |
| | | CCUGUUCAAGACCGACGAGGACAUCACCGGCCGGCUGAAGGACCGGGUGCAGCCC |
| | | GAGAUCCUGGAGGCCCUGCUGAAGCACAUCUCCUUCGACAAGUUCGUGCAGAUCU |
| | | CCCUGAAGGCCCUGCGGCGGAUCGUGCCCCUGAUGGAGCAGGGCAAGCGGUACGA |
| | | CGAGGCCUGCGCCGAGAUCUACGGCGACCACUACGGCAAGAAGAACACCGAGGAG |
| | | AAGAUCUACCUGCCCCCCAUCCCCGCCGACGAGAUCCGGAACCCCGUGGUGCUGC |
| | | GGGCCCUGUCCCAGGCCCGGAAGGUGAUCAACGGCGUGGUGCGGCGGUACGGCUC |
| | | CCCCGCCCGGAUCCACAUCGAGACCGCCCGGGAGGUGGGCAAGUCCUUCAAGGAC |
| | | CGGAAGGAGAUCGAGAAGCGGCAGGAGGAGAACCGGAAGGACCGGGAGAAGGCCG |
| | | CCGCCAAGUUCCGGGAGUACUUCCCCAACUUCGUGGGCGAGCCCAAGUCCAAGGA |
| | | CAUCCUGAAGCUGCGGCUGUACGAGCAGCAGCACGGCAAGUGCCUGUACUCCGGC |
| | | AAGGAGAUCAACCUGGUGCGGCUGAACGAGAAGGGCUACGUGGAGAUCGACCACG |
| | | CCCUGCCCUUCUCCCGGACCUGGGACGACUCCUUCAACAACAAGGUGCUGGUGCU |
| | | GGGCUCCGAGAACCAGAACAAGGGCAACCAGACCCCCUACGAGUACUUCAACGGC |
| | | AAGGACAACUCCCGGGAGUGGCAGGAGUUCAAGGCCCGGGUGGAGACCUCCCGGU |
| | | UCCCCCGGUCCAAGAAGCAGCGGAUCCUGCUGCAGAAGUUCGACGAGGACGGCUU |
| | | CAAGGAGUGCAACCUGAACGACACCCGGUACGUGAACCGCUUCCUGUGCCAGUUC |
| | | GUGGCCGACCACAUCCUGCUGACCGGCAAGGGCAAGCGGCGGGUGUUCGCCUCCA |
| | | ACGGCCAGAUCACCAACCUGCUGCGGGGCUUCUGGGGCCUGCGGAAGGUGCGGGC |
| | | CGAGAACGACCGGCACCACGCCCUGGACGCCGUGGUGGUGGCCUGCUCCACCGUG |
| | | GCCAUGCAGCAGAAGAUCACCCGGUUCGUGCGGUACAAGGAGAUGAACGCCUUCG |
| | | ACGGCAAGACCAUCGACAAGGAGACCGGCAAGGUGCUGCACCAGAAGACCCACUU |
| | | CCCCCAGCCCUGGGAGUUCUUCGCCCAGGAGGUGAUGAUCCGGGUGUUCGGCAAG |
| | | CCCGACGGCAAGCCCGAGUUCGAGGAGGCCGACACCCCCGAGAAGCUGCGGACCC |
| | | UGCUGGCCGAGAAGCUGUCCUCCCGGCCCGAGGCCGUGCACGAGUACGUGACCCC |
| | | CCUGUUCGUGUCCCGGGCCCCCAACCGGAAGAUGUCCGGCGCCCACAAGGACACC |
| | | CUGCGGUCCGCCAAGCGGUUCGUGAAGCACAACGAGAAGAUCUCCGUGAAGCGGG |
| | | UGUGGCUGACCGAGAUCAAGCUGGCCGACCUGGAGAACAUGGUGAACUACAAGAA |
| | | CGGCCGGGAGAUCGAGCUGUACGAGGCCCUGAAGGCCCGGCUGGAGGCCUACGGC |
| | | GGCAACGCCAAGCAGGCCUUCGACCCCAAGGACAACCCCUUCUACAAGAAGGGCG |
| | | GCCAGCUGGUGAAGGCCGUGCGGGUGGAGAAGACCCAGGAGUCCGGCGUGCUGCU |
| | | GAACAAGAAGAACGCCUACACCAUCGCCGACAACGGCGACAUGGUGCGGGUGGAC |
| | | GUGUUCUGCAAGGUGGACAAGAAGGGCAAGAACCAGUACUUCAUCGUGCCCAUCU |
| | | ACGCCUGGCAGGUGGCCGAGAACAUCCUGCCCGACAUCGACUGCAAGGGCUACCG |
| | | GAUCGACGACUCCUACACCUUCUGCUUCUCCCUGCACAAGUACGACCUGAUCGCC |
| | | UUCCAGAAGGACGAGAAGUCCAAGGUGGAGUUCGCCUACUACAUCAACUGCGACU |
| | | CCUCCAACGGCCGGUUCUACCUGGCCUGGCACGACAAGGGCUCCAAGGAGCAGCA |
| | | GUUCCGGAUCUCCACCCAGAACCUGGUGCUGAUCCAGAAGUACCAGGUGAACGAG |
| | | CUGGGCAAGGAGAUCCGGCCCUGCCGGCUGAAGAAGCGGCCCCCCGUGCGGUCCG |
| | | GAAAGCGGACCGCCGACGGCUCCGAGUUCGAGUCCCCCAAGAAGAAGCGGAAGGU |
| | | GGAGUAGCUAGCACCAGCCUCAAGAACACCCGAAUGGAGUCUCUAAGCUACAUAA |
| | | UACCAACUUACACUUUACAAAAUGUUGUCCCCCAAAAUGUAGCCAUUCGUAUCUG |
| | | CUCCUAAUAAAAAGAAAGUUUCUUCACAUUCUCUCGAGAAAAAAAAAAAAAAAAA |
| | | AAAAAAAAAAAAAAAAAAAAAAAAAAAAAAAAAAAAAAAAAAAAAAAAAAAAAAA |
| | | AAAAAAAAAAAAAAAAAAAAAUCUAG |
| 624 | mRNA E encoding | GGGAAGCUCAGAAUAAACGCUCAACUUUGGCCGGAUCUGCCACCAUGGAGGCCUC |
| | SpyCas9 base | CCCCGCCUCCGGCCCCCGGCACCUGAUGGACCCCCACAUCUUCACCUCCAACUUC |
| | editor | AACAACGGCAUCGGCCGGCACAAGACCUACCUGUGCUACGAGGUGGAGCGGCUGG |
| | | ACAACGGCACCUCCGUGAAGAUGGACCAGCACCGGGGCUUCCUGCACAACCAGGC |
| | | CAAGAACCUGCUGUGCGGCUUCUACGGCCGGCACGCCGAGCUGCGGUUCCUGGAC |
| | | CUGGUGCCCUCCCUGCAGCUGGACCCCGCCCAGAUCUACCGGGUGACCUGGUUCA |
| | | UCUCCUGGUCCCCCUGCUUCUCCUGGGGCUGCGCCGGCGAGGUGCGGGCCUUCCU |
| | | GCAGGAGAACACCCACGUGCGGCUGCGGAUCUUCGCCGCCCGGAUCUACGACUAC |
| | | GACCCCCUGUACAAGGAGGCCCUGCAGAUGCUGCGGGACGCCGGCGCCCAGGUGU |
| | | CCAUCAUGACCUACGACGAGUUCAAGCACUGCUGGGACACCUUCGUGGACCACCA |
| | | GGGCUGCCCCUUCCAGCCCUGGGACGGCCUGGACGAGCACUCCCAGGCCCUGUCC |
| | | GGCCGGCUGCGGGCCAUCCUGCAGAACCAGGGCAACUCCGGCUCCGAGACCCCCG |
| | | GCACCUCCGAGUCCGCCACCCCCGAGUCCGACAAGAAGUACUCCAUCGGCCUGGC |
| | | CAUCGGCACCAACUCCGUGGGCUGGGCCGUGAUCACCGACGAGUACAAGGUGCCC |
| | | UCCAAGAAGUUCAAGGUGCUGGGCAACACCGACCGGCACUCCAUCAAGAAGAACC |
| | | UGAUCGGCGCCCUGCUGUUCGACUCCGGCGAGACCGCCGAGGCCACCCGGCUGAA |
| | | GCGGACCGCCCGGCGGCGGUACACCCGGCGGAAGAACCGGAUCUGCUACCUGCAG |
| | | GAGAUCUUCUCCAACGAGAUGGCCAAGGUGGACGACUCCUUCUUCCACCGGCUGG |
| | | AGGAGUCCUUCCUGGUGGAGGAGGACAAGAAGCACGAGCGGCACCCCAUCUUCGG |
| | | CAACAUCGUGGACGAGGUGGCCUACCACGAGAAGUACCCCACCAUCUACCACCUG |
| | | CGGAAGAAGCUGGUGGACUCCACCGACAAGGCCGACCUGCGGCUGAUCUACCUGG |
| | | CCCUGGCCCACAUGAUCAAGUUCCGGGGCCACUUCCUGAUCGAGGGCGACCUGAA |
| | | CCCCGACAACUCCGACGUGGACAAGCUGUUCAUCCAGCUGGUGCAGACCUACAAC |
| | | CAGCUGUUCGAGGAGAACCCCAUCAACGCCUCCGGCGUGGACGCCAAGGCCAUCC |
| | | UGUCCGCCCGGCUGUCCAAGUCCCGGCGGCUGGAGAACCUGAUCGCCCAGCUGCC |
| | | CGGCGAGAAGAAGAACGGCCUGUUCGGCAACCUGAUCGCCCUGUCCCUGGGCCUG |
| | | ACCCCCAACUUCAAGUCCAACUUCGACCUGGCCGAGGACGCCAAGCUGCAGCUGU |
| | | CCAAGGACACCUACGACGACGACCUGGACAACCUGCUGGCCCAGAUCGGCGACCA |
| | | GUACGCCGACCUGUUCCUGGCCGCCAAGAACCUGUCCGACGCCAUCCUGCUGUCC |
| | | GACAUCCUGCGGGUGAACACCGAGAUCACCAAGGCCCCCCUGUCCGCCUCCAUGA |
| | | UCAAGCGGUACGACGAGCACCACCAGGACCUGACCCUGCUGAAGGCCCUGGUGCG |
| | | GCAGCAGCUGCCCGAGAAGUACAAGGAGAUCUUCUUCGACCAGUCCAAGAACGGC |
| | | UACGCCGGCUACAUCGACGGCGGCGCCUCCCAGGAGGAGUUCUACAAGUUCAUCA |
| | | AGCCCAUCCUGGAGAAGAUGGACGGCACCGAGGAGCUGCUGGUGAAGCUGAACCG |
| | | GGAGGACCUGCUGCGGAAGCAGCGGACCUUCGACAACGGCUCCAUCCCCCACCAG |
| | | AUCCACCUGGGCGAGCUGCACGCCAUCCUGCGGCGGCAGGAGGACUUCUACCCCU |
| | | UCCUGAAGGACAACCGGGAGAAGAUCGAGAAGAUCCUGACCUUCCGGAUCCCCUA |
| | | CUACGUGGGCCCCCUGGCCCGGGGCAACUCCCGGUUCGCCUGGAUGACCCGGAAG |
| | | UCCGAGGAGACCAUCACCCCCUGGAACUUCGAGGAGGUGGUGGACAAGGGCGCCU |
| | | CCGCCCAGUCCUUCAUCGAGCGGAUGACCAACUUCGACAAGAACCUGCCCAACGA |
| | | GAAGGUGCUGCCCAAGCACUCCCUGCUGUACGAGUACUUCACCGUGUACAACGAG |
| | | CUGACCAAGGUGAAGUACGUGACCGAGGGCAUGCGGAAGCCCGCCUUCCUGUCCG |
| | | GCGAGCAGAAGAAGGCCAUCGUGGACCUGCUGUUCAAGACCAACCGGAAGGUGAC |
| | | CGUGAAGCAGCUGAAGGAGGACUACUUCAAGAAGAUCGAGUGCUUCGACUCCGUG |
| | | GAGAUCUCCGGCGUGGAGGACCGGUUCAACGCCUCCCUGGGCACCUACCACGACC |
| | | UGCUGAAGAUCAUCAAGGACAAGGACUUCCUGGACAACGAGGAGAACGAGGACAU |
| | | CCUGGAGGACAUCGUGCUGACCCUGACCCUGUUCGAGGACCGGGAGAUGAUCGAG |
| | | GAGCGGCUGAAGACCUACGCCCACCUGUUCGACGACAAGGUGAUGAAGCAGCUGA |
| | | AGCGGCGGCGGUACACCGGCUGGGGCCGGCUGUCCCGGAAGCUGAUCAACGGCAU |
| | | CCGGGACAAGCAGUCCGGCAAGACCAUCCUGGACUUCCUGAAGUCCGACGGCUUC |
| | | GCCAACCGGAACUUCAUGCAGCUGAUCCACGACGACUCCCUGACCUUCAAGGAGG |
| | | ACAUCCAGAAGGCCCAGGUGUCCGGCCAGGGCGACUCCCUGCACGAGCACAUCGC |
| | | CAACCUGGCCGGCUCCCCCGCCAUCAAGAAGGGCAUCCUGCAGACCGUGAAGGUG |
| | | GUGGACGAGCUGGUGAAGGUGAUGGGCCGGCACAAGCCCGAGAACAUCGUGAUCG |
| | | AGAUGGCCCGGGAGAACCAGACCACCCAGAAGGGCCAGAAGAACUCCCGGGAGCG |
| | | GAUGAAGCGGAUCGAGGAGGGCAUCAAGGAGCUGGGCUCCCAGAUCCUGAAGGAG |
| | | CACCCCGUGGAGAACACCCAGCUGCAGAACGAGAAGCUGUACCUGUACUACCUGC |
| | | AGAACGGCCGGGACAUGUACGUGGACCAGGAGCUGGACAUCAACCGGCUGUCCGA |
| | | CUACGACGUGGACCACAUCGUGCCCCAGUCCUUCCUGAAGGACGACUCCAUCGAC |
| | | AACAAGGUGCUGACCCGGUCCGACAAGAACCGGGGCAAGUCCGACAACGUGCCCU |
| | | CCGAGGAGGUGGUGAAGAAGAUGAAGAACUACUGGCGGCAGCUGCUGAACGCCAA |
| | | GCUGAUCACCCAGCGGAAGUUCGACAACCUGACCAAGGCCGAGCGGGGCGGCCUG |
| | | UCCGAGCUGGACAAGGCCGGCUUCAUCAAGCGGCAGCUGGUGGAGACCCGGCAGA |
| | | UCACCAAGCACGUGGCCCAGAUCCUGGACUCCCGGAUGAACACCAAGUACGACGA |
| | | GAACGACAAGCUGAUCCGGGAGGUGAAGGUGAUCACCCUGAAGUCCAAGCUGGUG |
| | | UCCGACUUCCGGAAGGACUUCCAGUUCUACAAGGUGCGGGAGAUCAACAACUACC |
| | | ACCACGCCCACGACGCCUACCUGAACGCCGUGGUGGGCACCGCCCUGAUCAAGAA |
| | | GUACCCCAAGCUGGAGUCCGAGUUCGUGUACGGCGACUACAAGGUGUACGACGUG |
| | | CGGAAGAUGAUCGCCAAGUCCGAGCAGGAGAUCGGCAAGGCCACCGCCAAGUACU |
| | | UCUUCUACUCCAACAUCAUGAACUUCUUCAAGACCGAGAUCACCCUGGCCAACGG |
| | | CGAGAUCCGGAAGCGGCCCCUGAUCGAGACCAACGGCGAGACCGGCGAGAUCGUG |
| | | UGGGACAAGGGCCGGGACUUCGCCACCGUGCGGAAGGUGCUGUCCAUGCCCCAGG |
| | | UGAACAUCGUGAAGAAGACCGAGGUGCAGACCGGCGGCUUCUCCAAGGAGUCCAU |
| | | CCUGCCCAAGCGGAACUCCGACAAGCUGAUCGCCCGGAAGAAGGACUGGGACCCC |
| | | AAGAAGUACGGCGGCUUCGACUCCCCCACCGUGGCCUACUCCGUGCUGGUGGUGG |
| | | CCAAGGUGGAGAAGGGCAAGUCCAAGAAGCUGAAGUCCGUGAAGGAGCUGCUGGG |
| | | CAUCACCAUCAUGGAGCGGUCCUCCUUCGAGAAGAACCCCAUCGACUUCCUGGAG |
| | | GCCAAGGGCUACAAGGAGGUGAAGAAGGACCUGAUCAUCAAGCUGCCCAAGUACU |
| | | CCCUGUUCGAGCUGGAGAACGGCCGGAAGCGGAUGCUGGCCUCCGCCGGCGAGCU |
| | | GCAGAAGGGCAACGAGCUGGCCCUGCCCUCCAAGUACGUGAACUUCCUGUACCUG |
| | | GCCUCCCACUACGAGAAGCUGAAGGGCUCCCCCGAGGACAACGAGCAGAAGCAGC |
| | | UGUUCGUGGAGCAGCACAAGCACUACCUGGACGAGAUCAUCGAGCAGAUCUCCGA |
| | | GUUCUCCAAGCGGGUGAUCCUGGCCGACGCCAACCUGGACAAGGUGCUGUCCGCC |
| | | UACAACAAGCACCGGGACAAGCCCAUCCGGGAGCAGGCCGAGAACAUCAUCCACC |
| | | UGUUCACCCUGACCAACCUGGGCGCCCCCGCCGCCUUCAAGUACUUCGACACCAC |
| | | CAUCGACCGGAAGCGGUACACCUCCACCAAGGAGGUGCUGGACGCCACCCUGAUC |
| | | CACCAGUCCAUCACCGGCCUGUACGAGACCCGGAUCGACCUGUCCCAGCUGGGCG |
| | | GCGACGGCGGCGGCUCCCCCAAGAAGAAGCGGAAGGUGUGACUAGCACCAGCCUC |
| | | AAGAACACCCGAAUGGAGUCUCUAAGCUACAUAAUACCAACUUACACUUUACAAA |
| | | AUGUUGUCCCCCAAAAUGUAGCCAUUCGUAUCUGCUCCUAAUAAAAAGAAAGUUU |
| | | CUUCACAUUCUCUCGAGAAAAAAAAAAAAUGGAAAAAAAAAAAACGGAAAAAAAA |
| | | AAAAGGUAAAAAAAAAAAAUAUAAAAAAAAAAAACAUAAAAAAAAAAAACGAAAA |
| | | AAAAAAAACGUAAAAAAAAAAAACUCAAAAAAAAAAAAGAUAAAAAAAAAAAACC |
| | | UAAAAAAAAAAAAUGUAAAAAAAAAAAAGGGAAAAAAAAAAAACGCAAAAAAAAA |
| | | AAACACAAAAAAAAAAAAUGCAAAAAAAAAAAAUCGAAAAAAAAAAAAUCUAAAA |
| | | AAAAAAAACGAAAAAAAAAAAACCCAAAAAAAAAAAAGACAAAAAAAAAAAAUAG |
| | | AAAAAAAAAAAAGUUAAAAAAAAAAAACUGAAAAAAAAAAAAUUUAAAAAAAAAA |
| | | AAUCUAG |
| 625 | mRNA G encoding | GGGAAGCUCAGAAUAAACGCUCAACUUUGGCCGGAUCUGCCACCAUGACCAACCU |
| | UGI | GUCCGACAUCAUCGAGAAGGAGACCGGCAAGCAGCUGGUGAUCCAGGAGUCCAUC |
| | | CUGAUGCUGCCCGAGGAGGUGGAGGAGGUGAUCGGCAACAAGCCCGAGUCCGACA |
| | | UCCUGGUGCACACCGCCUACGACGAGUCCACCGACGAGAACGUGAUGCUGCUGAC |
| | | CUCCGACGCCCCCGAGUACAAGCCCUGGGCCCUGGUGAUCCAGGACUCCAACGGC |
| | | GAGAACAAGAUCAAGAUGCUGUCCGGCGGCUCCAAGCGGACCGCCGACGGCUCCG |
| | | AGUUCGAGUCCCCCAAGAAGAAGCGGAAGGUGGAGUGAUAGCUAGCACCAGCCUC |
| | | AAGAACACCCGAAUGGAGUCUCUAAGCUACAUAAUACCAACUUACACUUUACAAA |
| | | AUGUUGUCCCCCAAAAUGUAGCCAUUCGUAUCUGCUCCUAAUAAAAAGAAAGUUU |
| | | CUUCACAUUCUCUCGAGAAAAAAAAAAAAUGGAAAAAAAAAAAACGGAAAAAAAA |
| | | AAAAGGUAAAAAAAAAAAAUAUAAAAAAAAAAAACAUAAAAAAAAAAAACGAAAA |
| | | AAAAAAAACGUAAAAAAAAAAAACUCAAAAAAAAAAAAGAUAAAAAAAAAAAACC |
| | | UAAAAAAAAAAAAUGUAAAAAAAAAAAAGGGAAAAAAAAAAAACGCAAAAAAAAA |
| | | AAACACAAAAAAAAAAAAUGCAAAAAAAAAAAAUCGAAAAAAAAAAAAUCUAAAA |
| | | AAAAAAAACGAAAAAAAAAAAACCCAAAAAAAAAAAAGACAAAAAAAAAAAAUAG |
| | | AAAAAAAAAAAAGUUAAAAAAAAAAAACUGAAAAAAAAAAAAUUUAAAAAAAAAA |
| | | AAUCUAG |
| 626 | mRNA H encoding | GGGaagctcagaataaacgctcaactttggccggatctgccacCATGGCCGCCTT |
| | Nme2Cas 9 | CAAGCCCAACCCCATCAACTACATCCTGGGCCTGGACATCGGCATCGCCTCCGTG |
| | | GGCTGGGCCATGGTGGAGATCGACGAGGAGGAGAACCCCATCCGGCTGATCGACC |
| | | TGGGCGTGCGGGTGTTCGAGCGGGCCGAGGTGCCCAAGACCGGCGACTCCCTGGC |
| | | CATGGCCCGGCGGCTGGCCCGGTCCGTGCGGCGGCTGACCCGGCGGCGGGCCCAC |
| | | CGGCTGCTGCGGGCCCGGCGGCTGCTGAAGCGGGAGGGCGTGCTGCAGGCCGCCG |
| | | ACTTCGACGAGAACGGCCTGATCAAGTCCCTGCCCAACACCCCCTGGCAGCTGCG |
| | | GGCCGCCGCCCTGGACCGGAAGCTGACCCCCCTGGAGTGGTCCGCCGTGCTGCTG |
| | | CACCTGATCAAGCACCGGGGCTACCTGTCCCAGCGGAAGAACGAGGGCGAGACCG |
| | | CCGACAAGGAGCTGGGCGCCCTGCTGAAGGGCGTGGCCAACAACGCCCACGCCCT |
| | | GCAGACCGGCGACTTCCGGACCCCCGCCGAGCTGGCCCTGAACAAGTTCGAGAAG |
| | | GAGTCCGGCCACATCCGGAACCAGCGGGGCGACTACTCCCACACCTTCTCCCGGA |
| | | AGGACCTGCAGGCCGAGCTGATCCTGCTGTTCGAGAAGCAGAAGGAGTTCGGCAA |
| | | CCCCCACGTGTCCGGCGGCCTGAAGGAGGGCATCGAGACCCTGCTGATGACCCAG |
| | | CGGCCCGCCCTGTCCGGCGACGCCGTGCAGAAGATGCTGGGCCACTGCACCTTCG |
| | | AGCCCGCCGAGCCCAAGGCCGCCAAGAACACCTACACCGCCGAGCGGTTCATCTG |
| | | GCTGACCAAGCTGAACAACCTGCGGATCCTGGAGCAGGGCTCCGAGCGGCCCCTG |
| | | ACCGACACCGAGCGGGCCACCCTGATGGACGAGCCCTACCGGAAGTCCAAGCTGA |
| | | CCTACGCCCAGGCCCGGAAGCTGCTGGGCCTGGAGGACACCGCCTTCTTCAAGGG |
| | | CCTGCGGTACGGCAAGGACAACGCCGAGGCCTCCACCCTGATGGAGATGAAGGCC |
| | | TACCACGCCATCTCCCGGGCCCTGGAGAAGGAGGGCCTGAAGGACAAGAAGTCCC |
| | | CCCTGAACCTGTCCTCCGAGCTGCAGGACGAGATCGGCACCGCCTTCTCCCTGTT |
| | | CAAGACCGACGAGGACATCACCGGCCGGCTGAAGGACCGGGTGCAGCCCGAGATC |
| | | CTGGAGGCCCTGCTGAAGCACATCTCCTTCGACAAGTTCGTGCAGATCTCCCTGA |
| | | AGGCCCTGCGGCGGATCGTGCCCCTGATGGAGCAGGGCAAGCGGTACGACGAGGC |
| | | CTGCGCCGAGATCTACGGCGACCACTACGGCAAGAAGAACACCGAGGAGAAGATC |
| | | TACCTGCCCCCCATCCCCGCCGACGAGATCCGGAACCCCGTGGTGCTGCGGGCCC |
| | | TGTCCCAGGCCCGGAAGGTGATCAACGGCGTGGTGCGGCGGTACGGCTCCCCCGC |
| | | CCGGATCCACATCGAGACCGCCCGGGAGGTGGGCAAGTCCTTCAAGGACCGGAAG |
| | | GAGATCGAGAAGCGGCAGGAGGAGAACCGGAAGGACCGGGAGAAGGCCGCCGCCA |
| | | AGTTCCGGGAGTACTTCCCCAACTTCGTGGGCGAGCCCAAGTCCAAGGACATCCT |
| | | GAAGCTGCGGCTGTACGAGCAGCAGCACGGCAAGTGCCTGTACTCCGGCAAGGAG |
| | | ATCAACCTGGTGCGGCTGAACGAGAAGGGCTACGTGGAGATCGACCACGCCCTGC |
| | | CCTTCTCCCGGACCTGGGACGACTCCTTCAACAACAAGGTGCTGGTGCTGGGCTC |
| | | CGAGAACCAGAACAAGGGCAACCAGACCCCCTACGAGTACTTCAACGGCAAGGAC |
| | | AACTCCCGGGAGTGGCAGGAGTTCAAGGCCCGGGTGGAGACCTCCCGGTTCCCCC |
| | | GGTCCAAGAAGCAGCGGATCCTGCTGCAGAAGTTCGACGAGGACGGCTTCAAGGA |
| | | GTGCAACCTGAACGACACCCGGTACGTGAACCGGTTCCTGTGCCAGTTCGTGGCC |
| | | GACCACATCCTGCTGACCGGCAAGGGCAAGCGGCGGGTGTTCGCCTCCAACGGCC |
| | | AGATCACCAACCTGCTGCGGGGCTTCTGGGGCCTGCGGAAGGTGCGGGCCGAGAA |
| | | CGACCGGCACCACGCCCTGGACGCCGTGGTGGTGGCCTGCTCCACCGTGGCCATG |
| | | CAGCAGAAGATCACCCGGTTCGTGCGGTACAAGGAGATGAACGCCTTCGACGGCA |
| | | AGACCATCGACAAGGAGACCGGCAAGGTGCTGCACCAGAAGACCCACTTCCCCCA |
| | | GCCCTGGGAGTTCTTCGCCCAGGAGGTGATGATCCGGGTGTTCGGCAAGCCCGAC |
| | | GGCAAGCCCGAGTTCGAGGAGGCCGACACCCCCGAGAAGCTGCGGACCCTGCTGG |
| | | CCGAGAAGCTGTCCTCCCGGCCCGAGGCCGTGCACGAGTACGTGACCCCCCTGTT |
| | | CGTGTCCCGGGCCCCCAACCGGAAGATGTCCGGCGCCCACAAGGACACCCTGCGG |
| | | TCCGCCAAGCGGTTCGTGAAGCACAACGAGAAGATCTCCGTGAAGCGGGTGTGGC |
| | | TGACCGAGATCAAGCTGGCCGACCTGGAGAACATGGTGAACTACAAGAACGGCCG |
| | | GGAGATCGAGCTGTACGAGGCCCTGAAGGCCCGGCTGGAGGCCTACGGCGGCAAC |
| | | GCCAAGCAGGCCTTCGACCCCAAGGACAACCCCTTCTACAAGAAGGGCGGCCAGC |
| | | TGGTGAAGGCCGTGCGGGTGGAGAAGACCCAGGAGTCCGGCGTGCTGCTGAACAA |
| | | GAAGAACGCCTACACCATCGCCGACAACGGCGACATGGTGCGGGTGGACGTGTTC |
| | | TGCAAGGTGGACAAGTCCGGCGGCGGCTCCCCCAAGAAGAAGCGGAAGGTGTCCG |
| | | GCGGCTCCGGCAAGAACCAGTACTTCATCGTGCCCATCTACGCCTGGCAGGTGGC |
| | | CGAGAACATCCTGCCCGACATCGACTGCAAGGGCTACCGGATCGACGACTCCTAC |
| | | ACCTTCTGCTTCTCCCTGCACAAGTACGACCTGATCGCCTTCCAGAAGGACGAGA |
| | | AGTCCAAGGTGGAGTTCGCCTACTACATCAACTGCGACTCCTCCAACGGCCGGTT |
| | | CTACCTGGCCTGGCACGACAAGGGCTCCAAGGAGCAGCAGTTCCGGATCTCCACC |
| | | CAGAACCTGGTGCTGATCCAGAAGTACCAGGTGAACGAGCTGGGCAAGGAGATCC |
| | | GGCCCTGCCGGCTGAAGAAGCGGCCCCCCGTGCGGTAGCTAGCaccagcctcaag |
| | | aacacccgaatggagtctctaagctacataataccaacttacactttacaaaatg |
| | | ttgtcccccaaaatgtagccattcgtatctgctcctaataaaaagaaagtttctt |
| | | cacattctCTCGAGAAAAAAAAAAAATGGAAAAAAAAAAAACGGAAAAAAAAAAA |
| | | AGGTAAAAAAAAAAAATATAAAAAAAAAAAACATAAAAAAAAAAAACGAAAAAAA |
| | | AAAAACGTAAAAAAAAAAAACTCAAAAAAAAAAAAGATAAAAAAAAAAAACCTAA |
| | | AAAAAAAAAATGTAAAAAAAAAAAAGGGAAAAAAAAAAAACGCAAAAAAAAAAAA |
| | | CACAAAAAAAAAAAATGCAAAAAAAAAAAATCGAAAAAAAAAAAATCTAAAAAAA |
| | | AAAAACGAAAAAAAAAAAACCCAAAAAAAAAAAAGACAAAAAAAAAAAATAGAAA |
| | | AAAAAAAAAGTTAAAAAAAAAAAACTGAAAAAAAAAAAATTTAAAAAAAAAAAAT |
| 627 | mRNA I encoding | GGGaagctcagaataaacgctcaactttggccggatctgccacCATGGTGCCCAA |
| | Nme2Cas 9 | GAAGAAGCGGAAGGTGGCCGCCTTCAAGCCCAACCCCATCAACTACATCCTGGGC |
| | | CTGGACATCGGCATCGCCTCCGTGGGCTGGGCCATGGTGGAGATCGACGAGGAGG |
| | | AGAACCCCATCCGGCTGATCGACCTGGGCGTGCGGGTGTTCGAGCGGGCCGAGGT |
| | | GCCCAAGACCGGCGACTCCCTGGCCATGGCCCGGCGGCTGGCCCGGTCCGTGCGG |
| | | CGGCTGACCCGGCGGCGGGCCCACCGGCTGCTGCGGGCCCGGCGGCTGCTGAAGC |
| | | GGGAGGGCGTGCTGCAGGCCGCCGACTTCGACGAGAACGGCCTGATCAAGTCCCT |
| | | GCCCAACACCCCCTGGCAGCTGCGGGCCGCCGCCCTGGACCGGAAGCTGACCCCC |
| | | CTGGAGTGGTCCGCCGTGCTGCTGCACCTGATCAAGCACCGGGGCTACCTGTCCC |
| | | AGCGGAAGAACGAGGGCGAGACCGCCGACAAGGAGCTGGGCGCCCTGCTGAAGGG |
| | | CGTGGCCAACAACGCCCACGCCCTGCAGACCGGCGACTTCCGGACCCCCGCCGAG |
| | | CTGGCCCTGAACAAGTTCGAGAAGGAGTCCGGCCACATCCGGAACCAGCGGGGCG |
| | | ACTACTCCCACACCTTCTCCCGGAAGGACCTGCAGGCCGAGCTGATCCTGCTGTT |
| | | CGAGAAGCAGAAGGAGTTCGGCAACCCCCACGTGTCCGGCGGCCTGAAGGAGGGC |
| | | ATCGAGACCCTGCTGATGACCCAGCGGCCCGCCCTGTCCGGCGACGCCGTGCAGA |
| | | AGATGCTGGGCCACTGCACCTTCGAGCCCGCCGAGCCCAAGGCCGCCAAGAACAC |
| | | CTACACCGCCGAGCGGTTCATCTGGCTGACCAAGCTGAACAACCTGCGGATCCTG |
| | | GAGCAGGGCTCCGAGCGGCCCCTGACCGACACCGAGCGGGCCACCCTGATGGACG |
| | | AGCCCTACCGGAAGTCCAAGCTGACCTACGCCCAGGCCCGGAAGCTGCTGGGCCT |
| | | GGAGGACACCGCCTTCTTCAAGGGCCTGCGGTACGGCAAGGACAACGCCGAGGCC |
| | | TCCACCCTGATGGAGATGAAGGCCTACCACGCCATCTCCCGGGCCCTGGAGAAGG |
| | | AGGGCCTGAAGGACAAGAAGTCCCCCCTGAACCTGTCCTCCGAGCTGCAGGACGA |
| | | GATCGGCACCGCCTTCTCCCTGTTCAAGACCGACGAGGACATCACCGGCCGGCTG |
| | | AAGGACCGGGTGCAGCCCGAGATCCTGGAGGCCCTGCTGAAGCACATCTCCTTCG |
| | | ACAAGTTCGTGCAGATCTCCCTGAAGGCCCTGCGGCGGATCGTGCCCCTGATGGA |
| | | GCAGGGCAAGCGGTACGACGAGGCCTGCGCCGAGATCTACGGCGACCACTACGGC |
| | | AAGAAGAACACCGAGGAGAAGATCTACCTGCCCCCCATCCCCGCCGACGAGATCC |
| | | GGAACCCCGTGGTGCTGCGGGCCCTGTCCCAGGCCCGGAAGGTGATCAACGGCGT |
| | | GGTGCGGCGGTACGGCTCCCCCGCCCGGATCCACATCGAGACCGCCCGGGAGGTG |
| | | GGCAAGTCCTTCAAGGACCGGAAGGAGATCGAGAAGCGGCAGGAGGAGAACCGGA |
| | | AGGACCGGGAGAAGGCCGCCGCCAAGTTCCGGGAGTACTTCCCCAACTTCGTGGG |
| | | CGAGCCCAAGTCCAAGGACATCCTGAAGCTGCGGCTGTACGAGCAGCAGCACGGC |
| | | AAGTGCCTGTACTCCGGCAAGGAGATCAACCTGGTGCGGCTGAACGAGAAGGGCT |
| | | ACGTGGAGATCGACCACGCCCTGCCCTTCTCCCGGACCTGGGACGACTCCTTCAA |
| | | CAACAAGGTGCTGGTGCTGGGCTCCGAGAACCAGAACAAGGGCAACCAGACCCCC |
| | | TACGAGTACTTCAACGGCAAGGACAACTCCCGGGAGTGGCAGGAGTTCAAGGCCC |
| | | GGGTGGAGACCTCCCGGTTCCCCCGGTCCAAGAAGCAGCGGATCCTGCTGCAGAA |
| | | GTTCGACGAGGACGGCTTCAAGGAGTGCAACCTGAACGACACCCGGTACGTGAAC |
| | | CGGTTCCTGTGCCAGTTCGTGGCCGACCACATCCTGCTGACCGGCAAGGGCAAGC |
| | | GGCGGGTGTTCGCCTCCAACGGCCAGATCACCAACCTGCTGCGGGGCTTCTGGGG |
| | | CCTGCGGAAGGTGCGGGCCGAGAACGACCGGCACCACGCCCTGGACGCCGTGGTG |
| | | GTGGCCTGCTCCACCGTGGCCATGCAGCAGAAGATCACCCGGTTCGTGCGGTACA |
| | | AGGAGATGAACGCCTTCGACGGCAAGACCATCGACAAGGAGACCGGCAAGGTGCT |
| | | GCACCAGAAGACCCACTTCCCCCAGCCCTGGGAGTTCTTCGCCCAGGAGGTGATG |
| | | ATCCGGGTGTTCGGCAAGCCCGACGGCAAGCCCGAGTTCGAGGAGGCCGACACCC |
| | | CCGAGAAGCTGCGGACCCTGCTGGCCGAGAAGCTGTCCTCCCGGCCCGAGGCCGT |
| | | GCACGAGTACGTGACCCCCCTGTTCGTGTCCCGGGCCCCCAACCGGAAGATGTCC |
| | | GGCGCCCACAAGGACACCCTGCGGTCCGCCAAGCGGTTCGTGAAGCACAACGAGA |
| | | AGATCTCCGTGAAGCGGGTGTGGCTGACCGAGATCAAGCTGGCCGACCTGGAGAA |
| | | CATGGTGAACTACAAGAACGGCCGGGAGATCGAGCTGTACGAGGCCCTGAAGGCC |
| | | CGGCTGGAGGCCTACGGCGGCAACGCCAAGCAGGCCTTCGACCCCAAGGACAACC |
| | | CCTTCTACAAGAAGGGCGGCCAGCTGGTGAAGGCCGTGCGGGTGGAGAAGACCCA |
| | | GGAGTCCGGCGTGCTGCTGAACAAGAAGAACGCCTACACCATCGCCGACAACGGC |
| | | GACATGGTGCGGGTGGACGTGTTCTGCAAGGTGGACAAGAAGGGCAAGAACCAGT |
| | | ACTTCATCGTGCCCATCTACGCCTGGCAGGTGGCCGAGAACATCCTGCCCGACAT |
| | | CGACTGCAAGGGCTACCGGATCGACGACTCCTACACCTTCTGCTTCTCCCTGCAC |
| | | AAGTACGACCTGATCGCCTTCCAGAAGGACGAGAAGTCCAAGGTGGAGTTCGCCT |
| | | ACTACATCAACTGCGACTCCTCCAACGGCCGGTTCTACCTGGCCTGGCACGACAA |
| | | GGGCTCCAAGGAGCAGCAGTTCCGGATCTCCACCCAGAACCTGGTGCTGATCCAG |
| | | AAGTACCAGGTGAACGAGCTGGGCAAGGAGATCCGGCCCTGCCGGCTGAAGAAGC |
| | | GGCCCCCCGTGCGGTACCCCTACGACGTGCCCGACTACGCCGCCGCCCCCGCCGC |
| | | CAAGAAGAAGAAGCTGGACTAGCTAGCaccagcctcaagaacacccgaatggagt |
| | | ctctaagctacataataccaacttacactttacaaaatgttgtcccccaaaatgt |
| | | agccattcgtatctgctcctaataaaaagaaagtttcttcacattctCTCGAGAA |
| | | AAAAAAAAAATGGAAAAAAAAAAAACGGAAAAAAAAAAAAGGTAAAAAAAAAAAA |
| | | TATAAAAAAAAAAAACATAAAAAAAAAAAACGAAAAAAAAAAAACGTAAAAAAAA |
| | | AAAACTCAAAAAAAAAAAAGATAAAAAAAAAAAACCTAAAAAAAAAAAATGTAAA |
| | | AAAAAAAAAGGGAAAAAAAAAAAACGCAAAAAAAAAAAACACAAAAAAAAAAAAT |
| | | GCAAAAAAAAAAAATCGAAAAAAAAAAAATCTAAAAAAAAAAAACGAAAAAAAAA |
| | | AAACCCAAAAAAAAAAAAGACAAAAAAAAAAAATAGAAAAAAAAAAAAGTTAAAA |
| | | AAAAAAAACTGAAAAAAAAAAAATTTAAAAAAAAAAAAT |
| 628 | mRNA J encoding | GGGAAGCUCAGAAUAAACGCUCAACUUUGGCCGGAUCUGCCACCAUGGUGCCCAA |
| | Nme2Cas 9 | GAAGAAGCGGAAGGUGGAGGACAAGCGGCCCGCCGCCACCAAGAAGGCCGGCCAG |
| | | GCCAAGAAGAAGAAGAUGGCCGCCUUCAAGCCCAACCCCAUCAACUACAUCCUGG |
| | | GCCUGGACAUCGGCAUCGCCUCCGUGGGCUGGGCCAUGGUGGAGAUCGACGAGGA |
| | | GGAGAACCCCAUCCGGCUGAUCGACCUGGGCGUGCGGGUGUUCGAGCGGGCCGAG |
| | | GUGCCCAAGACCGGCGACUCCCUGGCCAUGGCCCGGCGGCUGGCCCGGUCCGUGC |
| | | GGCGGCUGACCCGGCGGCGGGCCCACCGGCUGCUGCGGGCCCGGCGGCUGCUGAA |
| | | GCGGGAGGGCGUGCUGCAGGCCGCCGACUUCGACGAGAACGGCCUGAUCAAGUCC |
| | | CUGCCCAACACCCCCUGGCAGCUGCGGGCCGCCGCCCUGGACCGGAAGCUGACCC |
| | | CCCUGGAGUGGUCCGCCGUGCUGCUGCACCUGAUCAAGCACCGGGGCUACCUGUC |
| | | CCAGCGGAAGAACGAGGGCGAGACCGCCGACAAGGAGCUGGGCGCCCUGCUGAAG |
| | | GGCGUGGCCAACAACGCCCACGCCCUGCAGACCGGCGACUUCCGGACCCCCGCCG |
| | | AGCUGGCCCUGAACAAGUUCGAGAAGGAGUCCGGCCACAUCCGGAACCAGCGGGG |
| | | CGACUACUCCCACACCUUCUCCCGGAAGGACCUGCAGGCCGAGCUGAUCCUGCUG |
| | | UUCGAGAAGCAGAAGGAGUUCGGCAACCCCCACGUGUCCGGCGGCCUGAAGGAGG |
| | | GCAUCGAGACCCUGCUGAUGACCCAGCGGCCCGCCCUGUCCGGCGACGCCGUGCA |
| | | GAAGAUGCUGGGCCACUGCACCUUCGAGCCCGCCGAGCCCAAGGCCGCCAAGAAC |
| | | ACCUACACCGCCGAGCGGUUCAUCUGGCUGACCAAGCUGAACAACCUGCGGAUCC |
| | | UGGAGCAGGGCUCCGAGCGGCCCCUGACCGACACCGAGCGGGCCACCCUGAUGGA |
| | | CGAGCCCUACCGGAAGUCCAAGCUGACCUACGCCCAGGCCCGGAAGCUGCUGGGC |
| | | CUGGAGGACACCGCCUUCUUCAAGGGCCUGCGGUACGGCAAGGACAACGCCGAGG |
| | | CCUCCACCCUGAUGGAGAUGAAGGCCUACCACGCCAUCUCCCGGGCCCUGGAGAA |
| | | GGAGGGCCUGAAGGACAAGAAGUCCCCCCUGAACCUGUCCUCCGAGCUGCAGGAC |
| | | GAGAUCGGCACCGCCUUCUCCCUGUUCAAGACCGACGAGGACAUCACCGGCCGGC |
| | | UGAAGGACCGGGUGCAGCCCGAGAUCCUGGAGGCCCUGCUGAAGCACAUCUCCUU |
| | | CGACAAGUUCGUGCAGAUCUCCCUGAAGGCCCUGCGGCGGAUCGUGCCCCUGAUG |
| | | GAGCAGGGCAAGCGGUACGACGAGGCCUGCGCCGAGAUCUACGGCGACCACUACG |
| | | GCAAGAAGAACACCGAGGAGAAGAUCUACCUGCCCCCCAUCCCCGCCGACGAGAU |
| | | CCGGAACCCCGUGGUGCUGCGGGCCCUGUCCCAGGCCCGGAAGGUGAUCAACGGC |
| | | GUGGUGCGGCGGUACGGCUCCCCCGCCCGGAUCCACAUCGAGACCGCCCGGGAGG |
| | | UGGGCAAGUCCUUCAAGGACCGGAAGGAGAUCGAGAAGCGGCAGGAGGAGAACCG |
| | | GAAGGACCGGGAGAAGGCCGCCGCCAAGUUCCGGGAGUACUUCCCCAACUUCGUG |
| | | GGCGAGCCCAAGUCCAAGGACAUCCUGAAGCUGCGGCUGUACGAGCAGCAGCACG |
| | | GCAAGUGCCUGUACUCCGGCAAGGAGAUCAACCUGGUGCGGCUGAACGAGAAGGG |
| | | CUACGUGGAGAUCGACCACGCCCUGCCCUUCUCCCGGACCUGGGACGACUCCUUC |
| | | AACAACAAGGUGCUGGUGCUGGGCUCCGAGAACCAGAACAAGGGCAACCAGACCC |
| | | CCUACGAGUACUUCAACGGCAAGGACAACUCCCGGGAGUGGCAGGAGUUCAAGGC |
| | | CCGGGUGGAGACCUCCCGGUUCCCCCGGUCCAAGAAGCAGCGGAUCCUGCUGCAG |
| | | AAGUUCGACGAGGACGGCUUCAAGGAGUGCAACCUGAACGACACCCGGUACGUGA |
| | | ACCGGUUCCUGUGCCAGUUCGUGGCCGACCACAUCCUGCUGACCGGCAAGGGCAA |
| | | GCGGCGGGUGUUCGCCUCCAACGGCCAGAUCACCAACCUGCUGCGGGGCUUCUGG |
| | | GGCCUGCGGAAGGUGCGGGCCGAGAACGACCGGCACCACGCCCUGGACGCCGUGG |
| | | UGGUGGCCUGCUCCACCGUGGCCAUGCAGCAGAAGAUCACCCGGUUCGUGCGGUA |
| | | CAAGGAGAUGAACGCCUUCGACGGCAAGACCAUCGACAAGGAGACCGGCAAGGUG |
| | | CUGCACCAGAAGACCCACUUCCCCCAGCCCUGGGAGUUCUUCGCCCAGGAGGUGA |
| | | UGAUCCGGGUGUUCGGCAAGCCCGACGGCAAGCCCGAGUUCGAGGAGGCCGACAC |
| | | CCCCGAGAAGCUGCGGACCCUGCUGGCCGAGAAGCUGUCCUCCCGGCCCGAGGCC |
| | | GUGCACGAGUACGUGACCCCCCUGUUCGUGUCCCGGGCCCCCAACCGGAAGAUGU |
| | | CCGGCGCCCACAAGGACACCCUGCGGUCCGCCAAGCGGUUCGUGAAGCACAACGA |
| | | GAAGAUCUCCGUGAAGCGGGUGUGGCUGACCGAGAUCAAGCUGGCCGACCUGGAG |
| | | AACAUGGUGAACUACAAGAACGGCCGGGAGAUCGAGCUGUACGAGGCCCUGAAGG |
| | | CCCGGCUGGAGGCCUACGGCGGCAACGCCAAGCAGGCCUUCGACCCCAAGGACAA |
| | | CCCCUUCUACAAGAAGGGCGGCCAGCUGGUGAAGGCCGUGCGGGUGGAGAAGACC |
| | | CAGGAGUCCGGCGUGCUGCUGAACAAGAAGAACGCCUACACCAUCGCCGACAACG |
| | | GCGACAUGGUGCGGGUGGACGUGUUCUGCAAGGUGGACAAGAAGGGCAAGAACCA |
| | | GUACUUCAUCGUGCCCAUCUACGCCUGGCAGGUGGCCGAGAACAUCCUGCCCGAC |
| | | AUCGACUGCAAGGGCUACCGGAUCGACGACUCCUACACCUUCUGCUUCUCCCUGC |
| | | ACAAGUACGACCUGAUCGCCUUCCAGAAGGACGAGAAGUCCAAGGUGGAGUUCGC |
| | | CUACUACAUCAACUGCGACUCCUCCAACGGCCGGUUCUACCUGGCCUGGCACGAC |
| | | AAGGGCUCCAAGGAGCAGCAGUUCCGGAUCUCCACCCAGAACCUGGUGCUGAUCC |
| | | AGAAGUACCAGGUGAACGAGCUGGGCAAGGAGAUCCGGCCCUGCCGGCUGAAGAA |
| | | GCGGCCCCCCGUGCGGGAGGACAAGCGGCCCGCCGCCACCAAGAAGGCCGGCCAG |
| | | GCCAAGAAGAAGAAGUACCCCUACGACGUGCCCGACUACGCCGGCUACCCCUACG |
| | | ACGUGCCCGACUACGCCGGCUCCUACCCCUACGACGUGCCCGACUACGCCGCCGC |
| | | CCCCGCCGCCAAGAAGAAGAAGCUGGACUAGCUAGCACCAGCCUCAAGAACACCC |
| | | GAAUGGAGUCUCUAAGCUACAUAAUACCAACUUACACUUUACAAAAUGUUGUCCC |
| | | CCAAAAUGUAGCCAUUCGUAUCUGCUCCUAAUAAAAAGAAAGUUUCUUCACAUUC |
| | | UCUCGAGAAAAAAAAAAAAUGGAAAAAAAAAAAACGGAAAAAAAAAAAAGGUAAA |
| | | AAAAAAAAAUAUAAAAAAAAAAAACAUAAAAAAAAAAAACGAAAAAAAAAAAACG |
| | | UAAAAAAAAAAAACUCAAAAAAAAAAAAGAUAAAAAAAAAAAACCUAAAAAAAAA |
| | | AAAUGUAAAAAAAAAAAAGGGAAAAAAAAAAAACGCAAAAAAAAAAAACACAAAA |
| | | AAAAAAAAUGCAAAAAAAAAAAAUCGAAAAAAAAAAAAUCUAAAAAAAAAAAACG |
| | | AAAAAAAAAAAACCCAAAAAAAAAAAAGACAAAAAAAAAAAAUAGAAAAAAAAAA |
| | | AAGUUAAAAAAAAAAAACUGAAAAAAAAAAAAUUUAAAAAAAAAAAAUCUAG |
| 629 | mRNA K encoding | GGGaagctcagaataaacgctcaactttggccggatctgccacCatggccgcctt |
| | Nme2Cas 9 | caagcccaaccccatcaactacatcctgggcctggacatcggcatcgcctccgtg |
| | | ggctgggccatggtggagatcgacgaggaggagaaccccatccggctgatcgacc |
| | | tgggcgtgcgggtgttcgagcgggccgaggtgcccaagaccggcgactccctggc |
| | | catggcccggcggctggcccggtccgtgcggcggctgacccggcggcgggcccac |
| | | cggctgctgcgggcccggcggctgctgaagcgggagggcgtgctgcaggccgccg |
| | | acttcgacgagaacggcctgatcaagtccctgcccaacaccccctggcagctgcg |
| | | ggccgccgccctggaccggaagctgacccccctggagtggtccgccgtgctgctg |
| | | cacctgatcaagcaccggggctacctgtcccagcggaagaacgagggcgagaccg |
| | | ccgacaaggagctgggcgccctgctgaagggcgtggccaacaacgcccacgccct |
| | | gcagaccggcgacttccggacccccgccgagctggccctgaacaagttcgagaag |
| | | gagtccggccacatccggaaccagcggggcgactactcccacaccttctcccgga |
| | | aggacctgcaggccgagctgatcctgctgttcgagaagcagaaggagttcggcaa |
| | | cccccacgtgtccggcggcctgaaggagggcatcgagaccctgctgatgacccag |
| | | cggcccgccctgtccggcgacgccgtgcagaagatgctgggccactgcaccttcg |
| | | agcccgccgagcccaaggccgccaagaacacctacaccgccgagcggttcatctg |
| | | gctgaccaagctgaacaacctgcggatcctggagcagggctccgagcggcccctg |
| | | accgacaccgagcgggccaccctgatggacgagccctaccggaagtccaagctga |
| | | cctacgcccaggcccggaagctgctgggcctggaggacaccgccttcttcaaggg |
| | | cctgcggtacggcaaggacaacgccgaggcctccaccctgatggagatgaaggcc |
| | | taccacgccatctcccgggccctggagaaggagggcctgaaggacaagaagtccc |
| | | ccctgaacctgtcctccgagctgcaggacgagatcggcaccgccttctccctgtt |
| | | caagaccgacgaggacatcaccggccggctgaaggaccgggtgcagcccgagatc |
| | | ctggaggccctgctgaagcacatctccttcgacaagttcgtgcagatctccctga |
| | | aggccctgcggcggatcgtgcccctgatggagcagggcaagcggtacgacgaggc |
| | | ctgcgccgagatctacggcgaccactacggcaagaagaacaccgaggagaagatc |
| | | tacctgccccccatccccgccgacgagatccggaaccccgtggtgctgcgggccc |
| | | tgtcccaggcccggaaggtgatcaacggcgtggtgcggcggtacggctcccccgc |
| | | ccggatccacatcgagaccgcccgggaggtgggcaagtccttcaaggaccggaag |
| | | gagatcgagaagcggcaggaggagaaccggaaggaccgggagaaggccgccgcca |
| | | agttccgggagtacttccccaacttcgtgggcgagcccaagtccaaggacatcct |
| | | gaagctgcggctgtacgagcagcagcacggcaagtgcctgtactccggcaaggag |
| | | atcaacctggtgcggctgaacgagaagggctacgtggagatcgaccacgccctgc |
| | | ccttctcccggacctgggacgactccttcaacaacaaggtgctggtgctgggctc |
| | | cgagaaccagaacaagggcaaccagaccccctacgagtacttcaacggcaaggac |
| | | aactcccgggagtggcaggagttcaaggcccgggtggagacctcccggttccccc |
| | | ggtccaagaagcagcggatcctgctgcagaagttcgacgaggacggcttcaagga |
| | | gtgcaacctgaacgacacccggtacgtgaaccggttcctgtgccagttcgtggcc |
| | | gaccacatcctgctgaccggcaagggcaagcggcgggtgttcgcctccaacggcc |
| | | agatcaccaacctgctgcggggcttctggggcctgcggaaggtgcgggccgagaa |
| | | cgaccggcaccacgccctggacgccgtggtggtggcctgctccaccgtggccatg |
| | | cagcagaagatcacccggttcgtgcggtacaaggagatgaacgccttcgacggca |
| | | agaccatcgacaaggagaccggcaaggtgctgcaccagaagacccacttccccca |
| | | gccctgggagttcttcgcccaggaggtgatgatccgggtgttcggcaagcccgac |
| | | ggcaagcccgagttcgaggaggccgacacccccgagaagctgcggaccctgctgg |
| | | ccgagaagctgtcctcccggcccgaggccgtgcacgagtacgtgacccccctgtt |
| | | cgtgtcccgggcccccaaccggaagatgtccggcgcccacaaggacaccctgcgg |
| | | tccgccaagcggttcgtgaagcacaacgagaagatctccgtgaagcgggtgtggc |
| | | tgaccgagatcaagctggccgacctggagaacatggtgaactacaagaacggccg |
| | | ggagatcgagctgtacgaggccctgaaggcccggctggaggcctacggcggcaac |
| | | gccaagcaggccttcgaccccaaggacaaccccttctacaagaagggcggccagc |
| | | tggtgaaggccgtgcgggtggagaagacccaggagtccggcgtgctgctgaacaa |
| | | gaagaacgcctacaccatcgccgacaacggcgacatggtgcgggtggacgtgttc |
| | | tgcaaggtggacaagaagggcaagaaccagtacttcatcgtgcccatctacgcct |
| | | ggcaggtggccgagaacatcctgcccgacatcgactgcaagggctaccggatcga |
| | | cgactcctacaccttctgcttctccctgcacaagtacgacctgatcgccttccag |
| | | aaggacgagaagtccaaggtggagttcgcctactacatcaactgcgactcctcca |
| | | acggccggttctacctggcctggcacgacaagggctccaaggagcagcagttccg |
| | | gatctccacccagaacctggtgctgatccagaagtaccaggtgaacgagctgggc |
| | | aaggagatccggccctgccggctgaagaagcggccccccgtgcggTCCGGAAAGC |
| | | GGACCGCCGACGGCTCCGGAGGAGGAAGCCCCAAGAAGAAGCGGAAGGTGtagct |
| | | agcaccagcctcaagaacacccgaatggagtctctaagctacataataccaactt |
| | | acactttacaaaatgttgtcccccaaaatgtagccattcgtatctgctcctaata |
| | | aaaagaaagtttcttcacattctctcgagAAAAAAAAAAAATGGAAAAAAAAAAA |
| | | ACGGAAAAAAAAAAAAGGTAAAAAAAAAAAATATAAAAAAAAAAAACATAAAAAA |
| | | AAAAAACGAAAAAAAAAAAACGTAAAAAAAAAAACTCAAAAAAAAAAAGATAAAA |
| | | AAAAAAAACCTAAAAAAAAAAAATGTAAAAAAAAAAAAGGGAAAAAAAAAAAACG |
| | | CAAAAAAAAAAAACACAAAAAAAAAAAATGCAAAAAAAAAAAATCGAAAAAAAAA |
| | | AAATCTAAAAAAAAAAAACGAAAAAAAAAAAACCCAAAAAAAAAAAAGACAAAAA |
| | | AAAAAAATAGAAAAAAAAAAAGTTAAAAAAAAAAAACTGAAAAAAAAAAAATTTA |
| | | AAAAAAAAAAAT |
| 630 | mRNA L encoding | GGGaagctcagaataaacgctcaactttggccggatctgccacCatgGACGGCTC |
| | Nme2Cas9 | CGGCGGCGGCTCCCCCAAGAAGAAGCGGAAGGTGGGCGGCTCCGGCGGCGGCgcc |
| | | gccttcaagcccaaccccatcaactacatcctgggcctggacatcggcatcgcct |
| | | ccgtgggctgggccatggtggagatcgacgaggaggagaaccccatccggctgat |
| | | cgacctgggcgtgcgggtgttcgagcgggccgaggtgcccaagaccggcgactcc |
| | | ctggccatggcccggcggctggcccggtccgtgcggcggctgacccggcggcggg |
| | | cccaccggctgctgcgggcccggcggctgctgaagcgggagggcgtgctgcaggc |
| | | cgccgacttcgacgagaacggcctgatcaagtccctgcccaacaccccctggcag |
| | | ctgcgggccgccgccctggaccggaagctgacccccctggagtggtccgccgtgc |
| | | tgctgcacctgatcaagcaccggggctacctgtcccagcggaagaacgagggcga |
| | | gaccgccgacaaggagctgggcgccctgctgaagggcgtggccaacaacgcccac |
| | | gccctgcagaccggcgacttccggacccccgccgagctggccctgaacaagttcg |
| | | agaaggagtccggccacatccggaaccagcggggcgactactcccacaccttctc |
| | | ccggaaggacctgcaggccgagctgatcctgctgttcgagaagcagaaggagttc |
| | | ggcaacccccacgtgtccggcggcctgaaggagggcatcgagaccctgctgatga |
| | | cccagcggcccgccctgtccggcgacgccgtgcagaagatgctgggccactgcac |
| | | cttcgagcccgccgagcccaaggccgccaagaacacctacaccgccgagcggttc |
| | | atctggctgaccaagctgaacaacctgcggatcctggagcagggctccgagcggc |
| | | ccctgaccgacaccgagcgggccaccctgatggacgagccctaccggaagtccaa |
| | | gctgacctacgcccaggcccggaagctgctgggcctggaggacaccgccttcttc |
| | | aagggcctgcggtacggcaaggacaacgccgaggcctccaccctgatggagatga |
| | | aggcctaccacgccatctcccgggccctggagaaggagggcctgaaggacaagaa |
| | | gtcccccctgaacctgtcctccgagctgcaggacgagatcggcaccgccttctcc |
| | | ctgttcaagaccgacgaggacatcaccggccggctgaaggaccgggtgcagcccg |
| | | agatcctggaggccctgctgaagcacatctccttcgacaagttcgtgcagatctc |
| | | cctgaaggccctgcggcggatcgtgcccctgatggagcagggcaagcggtacgac |
| | | gaggcctgcgccgagatctacggcgaccactacggcaagaagaacaccgaggaga |
| | | agatctacctgccccccatccccgccgacgagatccggaaccccgtggtgctgcg |
| | | ggccctgtcccaggcccggaaggtgatcaacggcgtggtgcggcggtacggctcc |
| | | cccgcccggatccacatcgagaccgcccgggaggtgggcaagtccttcaaggacc |
| | | ggaaggagatcgagaagcggcaggaggagaaccggaaggaccgggagaaggccgc |
| | | cgccaagttccgggagtacttccccaacttcgtgggcgagcccaagtccaaggac |
| | | atcctgaagctgcggctgtacgagcagcagcacggcaagtgcctgtactccggca |
| | | aggagatcaacctggtgcggctgaacgagaagggctacgtggagatcgaccacgc |
| | | cctgcccttctcccggacctgggacgactccttcaacaacaaggtgctggtgctg |
| | | ggctccgagaaccagaacaagggcaaccagaccccctacgagtacttcaacggca |
| | | aggacaactcccgggagtggcaggagttcaaggcccgggtggagacctcccggtt |
| | | cccccggtccaagaagcagcggatcctgctgcagaagttcgacgaggacggcttc |
| | | aaggagtgcaacctgaacgacacccggtacgtgaaccggttcctgtgccagttcg |
| | | tggccgaccacatcctgctgaccggcaagggcaagcggcgggtgttcgcctccaa |
| | | cggccagatcaccaacctgctgcggggcttctggggcctgcggaaggtgcgggcc |
| | | gagaacgaccggcaccacgccctggacgccgtggtggtggcctgctccaccgtgg |
| | | ccatgcagcagaagatcacccggttcgtgcggtacaaggagatgaacgccttcga |
| | | cggcaagaccatcgacaaggagaccggcaaggtgctgcaccagaagacccacttc |
| | | ccccagccctgggagttcttcgcccaggaggtgatgatccgggtgttcggcaagc |
| | | ccgacggcaagcccgagttcgaggaggccgacacccccgagaagctgcggaccct |
| | | gctggccgagaagctgtcctcccggcccgaggccgtgcacgagtacgtgaccccc |
| | | ctgttcgtgtcccgggcccccaaccggaagatgtccggcgcccacaaggacaccc |
| | | tgcggtccgccaagcggttcgtgaagcacaacgagaagatctccgtgaagcgggt |
| | | gtggctgaccgagatcaagctggccgacctggagaacatggtgaactacaagaac |
| | | ggccgggagatcgagctgtacgaggccctgaaggcccggctggaggcctacggcg |
| | | gcaacgccaagcaggccttcgaccccaaggacaaccccttctacaagaagggcgg |
| | | ccagctggtgaaggccgtgcgggtggagaagacccaggagtccggcgtgctgctg |
| | | aacaagaagaacgcctacaccatcgccgacaacggcgacatggtgcgggggacgt |
| | | gttctgcaaggtggacaagaagggcaagaaccagtacttcatcgtgcccatctac |
| | | gcctggcaggtggccgagaacatcctgcccgacatcgactgcaagggctaccgga |
| | | tcgacgactcctacaccttctgcttctccctgcacaagtacgacctgatcgcctt |
| | | ccagaaggacgagaagtccaaggtggagttcgcctactacatcaactgcgactcc |
| | | tccaacggccggttctacctggcctggcacgacaagggctccaaggagcagcagt |
| | | tccggatctccacccagaacctggtgctgatccagaagtaccaggtgaacgagct |
| | | gggcaaggagatccggccctgccggctgaagaagcggccccccgtgcggtagcta |
| | | gcaccagcctcaagaacacccgaatggagtctctaagctacataataccaactta |
| | | cactttacaaaatgttgtcccccaaaatgtagccattcgtatctgctcctaataa |
| | | aaagaaagtttcttcacattctctcgagAAAAAAAAAAAATGGAAAAAAAAAAAA |
| | | CGGAAAAAAAAAAAAGGTAAAAAAAAAAAATATAAAAAAAAAAAACATAAAAAAA |
| | | AAAAACGAAAAAAAAAAAACGTAAAAAAAAAAAACTCAAAAAAAAAAAGATAAAA |
| | | AAAAAAAACCTAAAAAAAAAAAATGTAAAAAAAAAAAAGGGAAAAAAAAAAAACG |
| | | CAAAAAAAAAAAACACAAAAAAAAAAAATGCAAAAAAAAAAAATCGAAAAAAAAA |
| | | AAATCTAAAAAAAAAAAACGAAAAAAAAAAAACCCAAAAAAAAAAAAGACAAAAA |
| | | AAAAAAATAGAAAAAAAAAAAGTTAAAAAAAAAAAACTGAAAAAAAAAAAATTTA |
| | | AAAAAAAAAAAT |
| 631 | mRNA M encoding | GGGAAGCUCAGAAUAAACGCUCAACUUUGGCCGGAUCUGCCACCAUGGACGGCUC |
| | Nme2Cas9 with | CGGCGGCGGCUCCCCCAAGAAGAAGCGGAAGGUGGGCGGCUCCGGCGGCGGCGCC |
| | HiBiT tag | GCCUUCAAGCCCAACCCCAUCAACUACAUCCUGGGCCUGGACAUCGGCAUCGCCU |
| | | CCGUGGGCUGGGCCAUGGUGGAGAUCGACGAGGAGGAGAACCCCAUCCGGCUGAU |
| | | CGACCUGGGCGUGCGGGUGUUCGAGCGGGCCGAGGUGCCCAAGACCGGCGACUCC |
| | | CUGGCCAUGGCCCGGCGGCUGGCCCGGUCCGUGCGGCGGCUGACCCGGCGGCGGG |
| | | CCCACCGGCUGCUGCGGGCCCGGCGGCUGCUGAAGCGGGAGGGCGUGCUGCAGGC |
| | | CGCCGACUUCGACGAGAACGGCCUGAUCAAGUCCCUGCCCAACACCCCCUGGCAG |
| | | CUGCGGGCCGCCGCCCUGGACCGGAAGCUGACCCCCCUGGAGUGGUCCGCCGUGC |
| | | UGCUGCACCUGAUCAAGCACCGGGGCUACCUGUCCCAGCGGAAGAACGAGGGCGA |
| | | GACCGCCGACAAGGAGCUGGGCGCCCUGCUGAAGGGCGUGGCCAACAACGCCCAC |
| | | GCCCUGCAGACCGGCGACUUCCGGACCCCCGCCGAGCUGGCCCUGAACAAGUUCG |
| | | AGAAGGAGUCCGGCCACAUCCGGAACCAGCGGGGCGACUACUCCCACACCUUCUC |
| | | CCGGAAGGACCUGCAGGCCGAGCUGAUCCUGCUGUUCGAGAAGCAGAAGGAGUUC |
| | | GGCAACCCCCACGUGUCCGGCGGCCUGAAGGAGGGCAUCGAGACCCUGCUGAUGA |
| | | CCCAGCGGCCCGCCCUGUCCGGCGACGCCGUGCAGAAGAUGCUGGGCCACUGCAC |
| | | CUUCGAGCCCGCCGAGCCCAAGGCCGCCAAGAACACCUACACCGCCGAGCGGUUC |
| | | AUCUGGCUGACCAAGCUGAACAACCUGCGGAUCCUGGAGCAGGGCUCCGAGCGGC |
| | | CCCUGACCGACACCGAGCGGGCCACCCUGAUGGACGAGCCCUACCGGAAGUCCAA |
| | | GCUGACCUACGCCCAGGCCCGGAAGCUGCUGGGCCUGGAGGACACCGCCUUCUUC |
| | | AAGGGCCUGCGGUACGGCAAGGACAACGCCGAGGCCUCCACCCUGAUGGAGAUGA |
| | | AGGCCUACCACGCCAUCUCCCGGGCCCUGGAGAAGGAGGGCCUGAAGGACAAGAA |
| | | GUCCCCCCUGAACCUGUCCUCCGAGCUGCAGGACGAGAUCGGCACCGCCUUCUCC |
| | | CUGUUCAAGACCGACGAGGACAUCACCGGCCGGCUGAAGGACCGGGUGCAGCCCG |
| | | AGAUCCUGGAGGCCCUGCUGAAGCACAUCUCCUUCGACAAGUUCGUGCAGAUCUC |
| | | CCUGAAGGCCCUGCGGCGGAUCGUGCCCCUGAUGGAGCAGGGCAAGCGGUACGAC |
| | | GAGGCCUGCGCCGAGAUCUACGGCGACCACUACGGCAAGAAGAACACCGAGGAGA |
| | | AGAUCUACCUGCCCCCCAUCCCCGCCGACGAGAUCCGGAACCCCGUGGUGCUGCG |
| | | GGCCCUGUCCCAGGCCCGGAAGGUGAUCAACGGCGUGGUGCGGCGGUACGGCUCC |
| | | CCCGCCCGGAUCCACAUCGAGACCGCCCGGGAGGUGGGCAAGUCCUUCAAGGACC |
| | | GGAAGGAGAUCGAGAAGCGGCAGGAGGAGAACCGGAAGGACCGGGAGAAGGCCGC |
| | | CGCCAAGUUCCGGGAGUACUUCCCCAACUUCGUGGGCGAGCCCAAGUCCAAGGAC |
| | | AUCCUGAAGCUGCGGCUGUACGAGCAGCAGCACGGCAAGUGCCUGUACUCCGGCA |
| | | AGGAGAUCAACCUGGUGCGGCUGAACGAGAAGGGCUACGUGGAGAUCGACCACGC |
| | | CCUGCCCUUCUCCCGGACCUGGGACGACUCCUUCAACAACAAGGUGCUGGUGCUG |
| | | GGCUCCGAGAACCAGAACAAGGGCAACCAGACCCCCUACGAGUACUUCAACGGCA |
| | | AGGACAACUCCCGGGAGUGGCAGGAGUUCAAGGCCCGGGUGGAGACCUCCCGGUU |
| | | CCCCCGGUCCAAGAAGCAGCGGAUCCUGCUGCAGAAGUUCGACGAGGACGGCUUC |
| | | AAGGAGUGCAACCUGAACGACACCCGGUACGUGAACCGGUUCCUGUGCCAGUUCG |
| | | UGGCCGACCACAUCCUGCUGACCGGCAAGGGCAAGCGGCGGGUGUUCGCCUCCAA |
| | | CGGCCAGAUCACCAACCUGCUGCGGGGCUUCUGGGGCCUGCGGAAGGUGCGGGCC |
| | | GAGAACGACCGGCACCACGCCCUGGACGCCGUGGUGGUGGCCUGCUCCACCGUGG |
| | | CCAUGCAGCAGAAGAUCACCCGGUUCGUGCGGUACAAGGAGAUGAACGCCUUCGA |
| | | CGGCAAGACCAUCGACAAGGAGACCGGCAAGGUGCUGCACCAGAAGACCCACUUC |
| | | CCCCAGCCCUGGGAGUUCUUCGCCCAGGAGGUGAUGAUCCGGGUGUUCGGCAAGC |
| | | CCGACGGCAAGCCCGAGUUCGAGGAGGCCGACACCCCCGAGAAGCUGCGGACCCU |
| | | GCUGGCCGAGAAGCUGUCCUCCCGGCCCGAGGCCGUGCACGAGUACGUGACCCCC |
| | | CUGUUCGUGUCCCGGGCCCCCAACCGGAAGAUGUCCGGCGCCCACAAGGACACCC |
| | | UGCGGUCCGCCAAGCGGUUCGUGAAGCACAACGAGAAGAUCUCCGUGAAGCGGGU |
| | | GUGGCUGACCGAGAUCAAGCUGGCCGACCUGGAGAACAUGGUGAACUACAAGAAC |
| | | GGCCGGGAGAUCGAGCUGUACGAGGCCCUGAAGGCCCGGCUGGAGGCCUACGGCG |
| | | GCAACGCCAAGCAGGCCUUCGACCCCAAGGACAACCCCUUCUACAAGAAGGGCGG |
| | | CCAGCUGGUGAAGGCCGUGCGGGUGGAGAAGACCCAGGAGUCCGGCGUGCUGCUG |
| | | AACAAGAAGAACGCCUACACCAUCGCCGACAACGGCGACAUGGUGCGGGUGGACG |
| | | UGUUCUGCAAGGUGGACAAGAAGGGCAAGAACCAGUACUUCAUCGUGCCCAUCUA |
| | | CGCCUGGCAGGUGGCCGAGAACAUCCUGCCCGACAUCGACUGCAAGGGCUACCGG |
| | | AUCGACGACUCCUACACCUUCUGCUUCUCCCUGCACAAGUACGACCUGAUCGCCU |
| | | UCCAGAAGGACGAGAAGUCCAAGGUGGAGUUCGCCUACUACAUCAACUGCGACUC |
| | | CUCCAACGGCCGGUUCUACCUGGCCUGGCACGACAAGGGCUCCAAGGAGCAGCAG |
| | | UUCCGGAUCUCCACCCAGAACCUGGUGCUGAUCCAGAAGUACCAGGUGAACGAGC |
| | | UGGGCAAGGAGAUCCGGCCCUGCCGGCUGAAGAAGCGGCCCCCCGUGCGGUCCGA |
| | | GUCCGCCACCCCCGAGUCCGUGUCCGGCUGGCGGCUGUUCAAGAAGAUCUCCUAG |
| | | CUAGCACCAGCCUCAAGAACACCCGAAUGGAGUCUCUAAGCUACAUAAUACCAAC |
| | | UUACACUUUACAAAAUGUUGUCCCCCAAAAUGUAGCCAUUCGUAUCUGCUCCUAA |
| | | UAAAAAGAAAGUUUCUUCACAUUCUCUCGAGAAAAAAAAAAAAUGGAAAAAAAAA |
| | | AAACGGAAAAAAAAAAAAGGUAAAAAAAAAAAAUAUAAAAAAAAAAAACAUAAAA |
| | | AAAAAAAACGAAAAAAAAAAAACGUAAAAAAAAAAAACUCAAAAAAAAAAAAGAU |
| | | AAAAAAAAAAAACCUAAAAAAAAAAAAUGUAAAAAAAAAAAAGGGAAAAAAAAAA |
| | | AACGCAAAAAAAAAAAACACAAAAAAAAAAAAUGCAAAAAAAAAAAAUCGAAAAA |
| | | AAAAAAAUCUAAAAAAAAAAAACGAAAAAAAAAAAACCCAAAAAAAAAAAAGACA |
| | | AAAAAAAAAAAUAGAAAAAAAAAAAAGUUAAAAAAAAAAAACUGAAAAAAAAAAA |
| | | AUUUAAAAAAAAAAAAUCUAG |
| 632 | mRNA N encoding | GGGAAGCUCAGAAUAAACGCUCAACUUUGGCCGGAUCUGCCACCAUGGACGGCUC |
| | Nme2Cas 9 | CGGCGGCGGCUCCCCCAAGAAGAAGCGGAAGGUGGGCGGCUCCGGCGGCGGCGCC |
| | | GCCUUCAAGCCCAACCCCAUCAACUACAUCCUGGGCCUGGACAUCGGCAUCGCCU |
| | | CCGUGGGCUGGGCCAUGGUGGAGAUCGACGAGGAGGAGAACCCCAUCCGGCUGAU |
| | | CGACCUGGGCGUGCGGGUGUUCGAGCGGGCCGAGGUGCCCAAGACCGGCGACUCC |
| | | CUGGCCAUGGCCCGGCGGCUGGCCCGGUCCGUGCGGCGGCUGACCCGGCGGCGGG |
| | | CCCACCGGCUGCUGCGGGCCCGGCGGCUGCUGAAGCGGGAGGGCGUGCUGCAGGC |
| | | CGCCGACUUCGACGAGAACGGCCUGAUCAAGUCCCUGCCCAACACCCCCUGGCAG |
| | | CUGCGGGCCGCCGCCCUGGACCGGAAGCUGACCCCCCUGGAGUGGUCCGCCGUGC |
| | | UGCUGCACCUGAUCAAGCACCGGGGCUACCUGUCCCAGCGGAAGAACGAGGGCGA |
| | | GACCGCCGACAAGGAGCUGGGCGCCCUGCUGAAGGGCGUGGCCAACAACGCCCAC |
| | | GCCCUGCAGACCGGCGACUUCCGGACCCCCGCCGAGCUGGCCCUGAACAAGUUCG |
| | | AGAAGGAGUCCGGCCACAUCCGGAACCAGCGGGGCGACUACUCCCACACCUUCUC |
| | | CCGGAAGGACCUGCAGGCCGAGCUGAUCCUGCUGUUCGAGAAGCAGAAGGAGUUC |
| | | GGCAACCCCCACGUGUCCGGCGGCCUGAAGGAGGGCAUCGAGACCCUGCUGAUGA |
| | | CCCAGCGGCCCGCCCUGUCCGGCGACGCCGUGCAGAAGAUGCUGGGCCACUGCAC |
| | | CUUCGAGCCCGCCGAGCCCAAGGCCGCCAAGAACACCUACACCGCCGAGCGGUUC |
| | | AUCUGGCUGACCAAGCUGAACAACCUGCGGAUCCUGGAGCAGGGCUCCGAGCGGC |
| | | CCCUGACCGACACCGAGCGGGCCACCCUGAUGGACGAGCCCUACCGGAAGUCCAA |
| | | GCUGACCUACGCCCAGGCCCGGAAGCUGCUGGGCCUGGAGGACACCGCCUUCUUC |
| | | AAGGGCCUGCGGUACGGCAAGGACAACGCCGAGGCCUCCACCCUGAUGGAGAUGA |
| | | AGGCCUACCACGCCAUCUCCCGGGCCCUGGAGAAGGAGGGCCUGAAGGACAAGAA |
| | | GUCCCCCCUGAACCUGUCCUCCGAGCUGCAGGACGAGAUCGGCACCGCCUUCUCC |
| | | CUGUUCAAGACCGACGAGGACAUCACCGGCCGGCUGAAGGACCGGGUGCAGCCCG |
| | | AGAUCCUGGAGGCCCUGCUGAAGCACAUCUCCUUCGACAAGUUCGUGCAGAUCUC |
| | | CCUGAAGGCCCUGCGGCGGAUCGUGCCCCUGAUGGAGCAGGGCAAGCGGUACGAC |
| | | GAGGCCUGCGCCGAGAUCUACGGCGACCACUACGGCAAGAAGAACACCGAGGAGA |
| | | AGAUCUACCUGCCCCCCAUCCCCGCCGACGAGAUCCGGAACCCCGUGGUGCUGCG |
| | | GGCCCUGUCCCAGGCCCGGAAGGUGAUCAACGGCGUGGUGCGGCGGUACGGCUCC |
| | | CCCGCCCGGAUCCACAUCGAGACCGCCCGGGAGGUGGGCAAGUCCUUCAAGGACC |
| | | GGAAGGAGAUCGAGAAGCGGCAGGAGGAGAACCGGAAGGACCGGGAGAAGGCCGC |
| | | CGCCAAGUUCCGGGAGUACUUCCCCAACUUCGUGGGCGAGCCCAAGUCCAAGGAC |
| | | AUCCUGAAGCUGCGGCUGUACGAGCAGCAGCACGGCAAGUGCCUGUACUCCGGCA |
| | | AGGAGAUCAACCUGGUGCGGCUGAACGAGAAGGGCUACGUGGAGAUCGACCACGC |
| | | CCUGCCCUUCUCCCGGACCUGGGACGACUCCUUCAACAACAAGGUGCUGGUGCUG |
| | | GGCUCCGAGAACCAGAACAAGGGCAACCAGACCCCCUACGAGUACUUCAACGGCA |
| | | AGGACAACUCCCGGGAGUGGCAGGAGUUCAAGGCCCGGGUGGAGACCUCCCGGUU |
| | | CCCCCGGUCCAAGAAGCAGCGGAUCCUGCUGCAGAAGUUCGACGAGGACGGCUUC |
| | | AAGGAGUGCAACCUGAACGACACCCGGUACGUGAACCGGUUCCUGUGCCAGUUCG |
| | | UGGCCGACCACAUCCUGCUGACCGGCAAGGGCAAGCGGCGGGUGUUCGCCUCCAA |
| | | CGGCCAGAUCACCAACCUGCUGCGGGGCUUCUGGGGCCUGCGGAAGGUGCGGGCC |
| | | GAGAACGACCGGCACCACGCCCUGGACGCCGUGGUGGUGGCCUGCUCCACCGUGG |
| | | CCAUGCAGCAGAAGAUCACCCGGUUCGUGCGGUACAAGGAGAUGAACGCCUUCGA |
| | | CGGCAAGACCAUCGACAAGGAGACCGGCAAGGUGCUGCACCAGAAGACCCACUUC |
| | | CCCCAGCCCUGGGAGUUCUUCGCCCAGGAGGUGAUGAUCCGGGUGUUCGGCAAGC |
| | | CCGACGGCAAGCCCGAGUUCGAGGAGGCCGACACCCCCGAGAAGCUGCGGACCCU |
| | | GCUGGCCGAGAAGCUGUCCUCCCGGCCCGAGGCCGUGCACGAGUACGUGACCCCC |
| | | CUGUUCGUGUCCCGGGCCCCCAACCGGAAGAUGUCCGGCGCCCACAAGGACACCC |
| | | UGCGGUCCGCCAAGCGGUUCGUGAAGCACAACGAGAAGAUCUCCGUGAAGCGGGU |
| | | GUGGCUGACCGAGAUCAAGCUGGCCGACCUGGAGAACAUGGUGAACUACAAGAAC |
| | | GGCCGGGAGAUCGAGCUGUACGAGGCCCUGAAGGCCCGGCUGGAGGCCUACGGCG |
| | | GCAACGCCAAGCAGGCCUUCGACCCCAAGGACAACCCCUUCUACAAGAAGGGCGG |
| | | CCAGCUGGUGAAGGCCGUGCGGGUGGAGAAGACCCAGGAGUCCGGCGUGCUGCUG |
| | | AACAAGAAGAACGCCUACACCAUCGCCGACAACGGCGACAUGGUGCGGGUGGACG |
| | | UGUUCUGCAAGGUGGACAAGAAGGGCAAGAACCAGUACUUCAUCGUGCCCAUCUA |
| | | CGCCUGGCAGGUGGCCGAGAACAUCCUGCCCGACAUCGACUGCAAGGGCUACCGG |
| | | AUCGACGACUCCUACACCUUCUGCUUCUCCCUGCACAAGUACGACCUGAUCGCCU |
| | | UCCAGAAGGACGAGAAGUCCAAGGUGGAGUUCGCCUACUACAUCAACUGCGACUC |
| | | CUCCAACGGCCGGUUCUACCUGGCCUGGCACGACAAGGGCUCCAAGGAGCAGCAG |
| | | UUCCGGAUCUCCACCCAGAACCUGGUGCUGAUCCAGAAGUACCAGGUGAACGAGC |
| | | UGGGCAAGGAGAUCCGGCCCUGCCGGCUGAAGAAGCGGCCCCCCGUGCGGUCCGG |
| | | AAAGCGGACCGCCGACGGCUCCGGAGGAGGAAGCCCCGCCGCCAAGAAGAAGAAG |
| | | CUGGACUAGCUAGCACCAGCCUCAAGAACACCCGAAUGGAGUCUCUAAGCUACAU |
| | | AAUACCAACUUACACUUUACAAAAUGUUGUCCCCCAAAAUGUAGCCAUUCGUAUC |
| | | UGCUCCUAAUAAAAAGAAAGUUUCUUCACAUUCUCUCGAGAAAAAAAAAAAAUGG |
| | | AAAAAAAAAAAACGGAAAAAAAAAAAAGGUAAAAAAAAAAAAUAUAAAAAAAAAA |
| | | AACAUAAAAAAAAAAAACGAAAAAAAAAAAACGUAAAAAAAAAAAACUCAAAAAA |
| | | AAAAAGAUAAAAAAAAAAAACCUAAAAAAAAAAAAUGUAAAAAAAAAAAAGGGAA |
| | | AAAAAAAAAACGCAAAAAAAAAAAACACAAAAAAAAAAAAUGCAAAAAAAAAAAA |
| | | UCGAAAAAAAAAAAAUCUAAAAAAAAAAAACGAAAAAAAAAAAACCCAAAAAAAA |
| | | AAAAGACAAAAAAAAAAAAUAGAAAAAAAAAAAGUUAAAAAAAAAAAACUGAAAA |
| | | AAAAAAAAUUUAAAAAAAAAAAAUCUAG |
| 633 | mRNA O encoding | GGGAAGCUCAGAAUAAACGCUCAACUUUGGCCGGAUCUGCCACCAUGGACGGCUC |
| | Nme 2Cas 9 | CGGCGGCGGCUCCCCCAAGAAGAAGCGGAAGGUGGAGGACAAGCGGCCCGCCGCC |
| | | ACCAAGAAGGCCGGCCAGGCCAAGAAGAAGAAGGGCGGCUCCGGCGGCGGCGCCG |
| | | CCUUCAAGCCCAACCCCAUCAACUACAUCCUGGGCCUGGACAUCGGCAUCGCCUC |
| | | CGUGGGCUGGGCCAUGGUGGAGAUCGACGAGGAGGAGAACCCCAUCCGGCUGAUC |
| | | GACCUGGGCGUGCGGGUGUUCGAGCGGGCCGAGGUGCCCAAGACCGGCGACUCCC |
| | | UGGCCAUGGCCCGGCGGCUGGCCCGGUCCGUGCGGCGGCUGACCCGGCGGCGGGC |
| | | CCACCGGCUGCUGCGGGCCCGGCGGCUGCUGAAGCGGGAGGGCGUGCUGCAGGCC |
| | | GCCGACUUCGACGAGAACGGCCUGAUCAAGUCCCUGCCCAACACCCCCUGGCAGC |
| | | UGCGGGCCGCCGCCCUGGACCGGAAGCUGACCCCCCUGGAGUGGUCCGCCGUGCU |
| | | GCUGCACCUGAUCAAGCACCGGGGCUACCUGUCCCAGCGGAAGAACGAGGGCGAG |
| | | ACCGCCGACAAGGAGCUGGGCGCCCUGCUGAAGGGCGUGGCCAACAACGCCCACG |
| | | CCCUGCAGACCGGCGACUUCCGGACCCCCGCCGAGCUGGCCCUGAACAAGUUCGA |
| | | GAAGGAGUCCGGCCACAUCCGGAACCAGCGGGGCGACUACUCCCACACCUUCUCC |
| | | CGGAAGGACCUGCAGGCCGAGCUGAUCCUGCUGUUCGAGAAGCAGAAGGAGUUCG |
| | | GCAACCCCCACGUGUCCGGCGGCCUGAAGGAGGGCAUCGAGACCCUGCUGAUGAC |
| | | CCAGCGGCCCGCCCUGUCCGGCGACGCCGUGCAGAAGAUGCUGGGCCACUGCACC |
| | | UUCGAGCCCGCCGAGCCCAAGGCCGCCAAGAACACCUACACCGCCGAGCGGUUCA |
| | | UCUGGCUGACCAAGCUGAACAACCUGCGGAUCCUGGAGCAGGGCUCCGAGCGGCC |
| | | CCUGACCGACACCGAGCGGGCCACCCUGAUGGACGAGCCCUACCGGAAGUCCAAG |
| | | CUGACCUACGCCCAGGCCCGGAAGCUGCUGGGCCUGGAGGACACCGCCUUCUUCA |
| | | AGGGCCUGCGGUACGGCAAGGACAACGCCGAGGCCUCCACCCUGAUGGAGAUGAA |
| | | GGCCUACCACGCCAUCUCCCGGGCCCUGGAGAAGGAGGGCCUGAAGGACAAGAAG |
| | | UCCCCCCUGAACCUGUCCUCCGAGCUGCAGGACGAGAUCGGCACCGCCUUCUCCC |
| | | UGUUCAAGACCGACGAGGACAUCACCGGCCGGCUGAAGGACCGGGUGCAGCCCGA |
| | | GAUCCUGGAGGCCCUGCUGAAGCACAUCUCCUUCGACAAGUUCGUGCAGAUCUCC |
| | | CUGAAGGCCCUGCGGCGGAUCGUGCCCCUGAUGGAGCAGGGCAAGCGGUACGACG |
| | | AGGCCUGCGCCGAGAUCUACGGCGACCACUACGGCAAGAAGAACACCGAGGAGAA |
| | | GAUCUACCUGCCCCCCAUCCCCGCCGACGAGAUCCGGAACCCCGUGGUGCUGCGG |
| | | GCCCUGUCCCAGGCCCGGAAGGUGAUCAACGGCGUGGUGCGGCGGUACGGCUCCC |
| | | CCGCCCGGAUCCACAUCGAGACCGCCCGGGAGGUGGGCAAGUCCUUCAAGGACCG |
| | | GAAGGAGAUCGAGAAGCGGCAGGAGGAGAACCGGAAGGACCGGGAGAAGGCCGCC |
| | | GCCAAGUUCCGGGAGUACUUCCCCAACUUCGUGGGCGAGCCCAAGUCCAAGGACA |
| | | UCCUGAAGCUGCGGCUGUACGAGCAGCAGCACGGCAAGUGCCUGUACUCCGGCAA |
| | | GGAGAUCAACCUGGUGCGGCUGAACGAGAAGGGCUACGUGGAGAUCGACCACGCC |
| | | CUGCCCUUCUCCCGGACCUGGGACGACUCCUUCAACAACAAGGUGCUGGUGCUGG |
| | | GCUCCGAGAACCAGAACAAGGGCAACCAGACCCCCUACGAGUACUUCAACGGCAA |
| | | GGACAACUCCCGGGAGUGGCAGGAGUUCAAGGCCCGGGUGGAGACCUCCCGGUUC |
| | | CCCCGGUCCAAGAAGCAGCGGAUCCUGCUGCAGAAGUUCGACGAGGACGGCUUCA |
| | | AGGAGUGCAACCUGAACGACACCCGGUACGUGAACCGGUUCCUGUGCCAGUUCGU |
| | | GGCCGACCACAUCCUGCUGACCGGCAAGGGCAAGCGGCGGGUGUUCGCCUCCAAC |
| | | GGCCAGAUCACCAACCUGCUGCGGGGCUUCUGGGGCCUGCGGAAGGUGCGGGCCG |
| | | AGAACGACCGGCACCACGCCCUGGACGCCGUGGUGGUGGCCUGCUCCACCGUGGC |
| | | CAUGCAGCAGAAGAUCACCCGGUUCGUGCGGUACAAGGAGAUGAACGCCUUCGAC |
| | | GGCAAGACCAUCGACAAGGAGACCGGCAAGGUGCUGCACCAGAAGACCCACUUCC |
| | | CCCAGCCCUGGGAGUUCUUCGCCCAGGAGGUGAUGAUCCGGGUGUUCGGCAAGCC |
| | | CGACGGCAAGCCCGAGUUCGAGGAGGCCGACACCCCCGAGAAGCUGCGGACCCUG |
| | | CUGGCCGAGAAGCUGUCCUCCCGGCCCGAGGCCGUGCACGAGUACGUGACCCCCC |
| | | UGUUCGUGUCCCGGGCCCCCAACCGGAAGAUGUCCGGCGCCCACAAGGACACCCU |
| | | GCGGUCCGCCAAGCGGUUCGUGAAGCACAACGAGAAGAUCUCCGUGAAGCGGGUG |
| | | UGGCUGACCGAGAUCAAGCUGGCCGACCUGGAGAACAUGGUGAACUACAAGAACG |
| | | GCCGGGAGAUCGAGCUGUACGAGGCCCUGAAGGCCCGGCUGGAGGCCUACGGCGG |
| | | CAACGCCAAGCAGGCCUUCGACCCCAAGGACAACCCCUUCUACAAGAAGGGCGGC |
| | | CAGCUGGUGAAGGCCGUGCGGGUGGAGAAGACCCAGGAGUCCGGCGUGCUGCUGA |
| | | ACAAGAAGAACGCCUACACCAUCGCCGACAACGGCGACAUGGUGCGGGUGGACGU |
| | | GUUCUGCAAGGUGGACAAGAAGGGCAAGAACCAGUACUUCAUCGUGCCCAUCUAC |
| | | GCCUGGCAGGUGGCCGAGAACAUCCUGCCCGACAUCGACUGCAAGGGCUACCGGA |
| | | UCGACGACUCCUACACCUUCUGCUUCUCCCUGCACAAGUACGACCUGAUCGCCUU |
| | | CCAGAAGGACGAGAAGUCCAAGGUGGAGUUCGCCUACUACAUCAACUGCGACUCC |
| | | UCCAACGGCCGGUUCUACCUGGCCUGGCACGACAAGGGCUCCAAGGAGCAGCAGU |
| | | UCCGGAUCUCCACCCAGAACCUGGUGCUGAUCCAGAAGUACCAGGUGAACGAGCU |
| | | GGGCAAGGAGAUCCGGCCCUGCCGGCUGAAGAAGCGGCCCCCCGUGCGGUAGCUA |
| | | GCACCAGCCUCAAGAACACCCGAAUGGAGUCUCUAAGCUACAUAAUACCAACUUA |
| | | CACUUUACAAAAUGUUGUCCCCCAAAAUGUAGCCAUUCGUAUCUGCUCCUAAUAA |
| | | AAAGAAAGUUUCUUCACAUUCUCUCGAGAAAAAAAAAAAAUGGAAAAAAAAAAAA |
| | | CGGAAAAAAAAAAAAGGUAAAAAAAAAAAAUAUAAAAAAAAAAAACAUAAAAAAA |
| | | AAAAACGAAAAAAAAAAAACGUAAAAAAAAAAAACUCAAAAAAAAAAAGAUAAAA |
| | | AAAAAAAACCUAAAAAAAAAAAAUGUAAAAAAAAAAAAGGGAAAAAAAAAAAACG |
| | | CAAAAAAAAAAAACACAAAAAAAAAAAAUGCAAAAAAAAAAAAUCGAAAAAAAAA |
| | | AAAUCUAAAAAAAAAAAACGAAAAAAAAAAAACCCAAAAAAAAAAAAGACAAAAA |
| | | AAAAAAAUAGAAAAAAAAAAAGUUAAAAAAAAAAAACUGAAAAAAAAAAAAUUUA |
| | | AAAAAAAAAAAUCUAG |
| 634 | mRNA P encoding | GGGAAGCUCAGAAUAAACGCUCAACUUUGGCCGGAUCUGCCACCAUGGACGGCUC |
| | Nme2Cas9 with | CGGCGGCGGCUCCCCCAAGAAGAAGCGGAAGGUGGAGGACAAGCGGCCCGCCGCC |
| | HiBiT tag | ACCAAGAAGGCCGGCCAGGCCAAGAAGAAGAAGGGCGGCUCCGGCGGCGGCGCCG |
| | | CCUUCAAGCCCAACCCCAUCAACUACAUCCUGGGCCUGGACAUCGGCAUCGCCUC |
| | | CGUGGGCUGGGCCAUGGUGGAGAUCGACGAGGAGGAGAACCCCAUCCGGCUGAUC |
| | | GACCUGGGCGUGCGGGUGUUCGAGCGGGCCGAGGUGCCCAAGACCGGCGACUCCC |
| | | UGGCCAUGGCCCGGCGGCUGGCCCGGUCCGUGCGGCGGCUGACCCGGCGGCGGGC |
| | | CCACCGGCUGCUGCGGGCCCGGCGGCUGCUGAAGCGGGAGGGCGUGCUGCAGGCC |
| | | GCCGACUUCGACGAGAACGGCCUGAUCAAGUCCCUGCCCAACACCCCCUGGCAGC |
| | | UGCGGGCCGCCGCCCUGGACCGGAAGCUGACCCCCCUGGAGUGGUCCGCCGUGCU |
| | | GCUGCACCUGAUCAAGCACCGGGGCUACCUGUCCCAGCGGAAGAACGAGGGCGAG |
| | | ACCGCCGACAAGGAGCUGGGCGCCCUGCUGAAGGGCGUGGCCAACAACGCCCACG |
| | | CCCUGCAGACCGGCGACUUCCGGACCCCCGCCGAGCUGGCCCUGAACAAGUUCGA |
| | | GAAGGAGUCCGGCCACAUCCGGAACCAGCGGGGCGACUACUCCCACACCUUCUCC |
| | | CGGAAGGACCUGCAGGCCGAGCUGAUCCUGCUGUUCGAGAAGCAGAAGGAGUUCG |
| | | GCAACCCCCACGUGUCCGGCGGCCUGAAGGAGGGCAUCGAGACCCUGCUGAUGAC |
| | | CCAGCGGCCCGCCCUGUCCGGCGACGCCGUGCAGAAGAUGCUGGGCCACUGCACC |
| | | UUCGAGCCCGCCGAGCCCAAGGCCGCCAAGAACACCUACACCGCCGAGCGGUUCA |
| | | UCUGGCUGACCAAGCUGAACAACCUGCGGAUCCUGGAGCAGGGCUCCGAGCGGCC |
| | | CCUGACCGACACCGAGCGGGCCACCCUGAUGGACGAGCCCUACCGGAAGUCCAAG |
| | | CUGACCUACGCCCAGGCCCGGAAGCUGCUGGGCCUGGAGGACACCGCCUUCUUCA |
| | | AGGGCCUGCGGUACGGCAAGGACAACGCCGAGGCCUCCACCCUGAUGGAGAUGAA |
| | | GGCCUACCACGCCAUCUCCCGGGCCCUGGAGAAGGAGGGCCUGAAGGACAAGAAG |
| | | UCCCCCCUGAACCUGUCCUCCGAGCUGCAGGACGAGAUCGGCACCGCCUUCUCCC |
| | | UGUUCAAGACCGACGAGGACAUCACCGGCCGGCUGAAGGACCGGGUGCAGCCCGA |
| | | GAUCCUGGAGGCCCUGCUGAAGCACAUCUCCUUCGACAAGUUCGUGCAGAUCUCC |
| | | CUGAAGGCCCUGCGGCGGAUCGUGCCCCUGAUGGAGCAGGGCAAGCGGUACGACG |
| | | AGGCCUGCGCCGAGAUCUACGGCGACCACUACGGCAAGAAGAACACCGAGGAGAA |
| | | GAUCUACCUGCCCCCCAUCCCCGCCGACGAGAUCCGGAACCCCGUGGUGCUGCGG |
| | | GCCCUGUCCCAGGCCCGGAAGGUGAUCAACGGCGUGGUGCGGCGGUACGGCUCCC |
| | | CCGCCCGGAUCCACAUCGAGACCGCCCGGGAGGUGGGCAAGUCCUUCAAGGACCG |
| | | GAAGGAGAUCGAGAAGCGGCAGGAGGAGAACCGGAAGGACCGGGAGAAGGCCGCC |
| | | GCCAAGUUCCGGGAGUACUUCCCCAACUUCGUGGGCGAGCCCAAGUCCAAGGACA |
| | | UCCUGAAGCUGCGGCUGUACGAGCAGCAGCACGGCAAGUGCCUGUACUCCGGCAA |
| | | GGAGAUCAACCUGGUGCGGCUGAACGAGAAGGGCUACGUGGAGAUCGACCACGCC |
| | | CUGCCCUUCUCCCGGACCUGGGACGACUCCUUCAACAACAAGGUGCUGGUGCUGG |
| | | GCUCCGAGAACCAGAACAAGGGCAACCAGACCCCCUACGAGUACUUCAACGGCAA |
| | | GGACAACUCCCGGGAGUGGCAGGAGUUCAAGGCCCGGGUGGAGACCUCCCGGUUC |
| | | CCCCGGUCCAAGAAGCAGCGGAUCCUGCUGCAGAAGUUCGACGAGGACGGCUUCA |
| | | AGGAGUGCAACCUGAACGACACCCGGUACGUGAACCGGUUCCUGUGCCAGUUCGU |
| | | GGCCGACCACAUCCUGCUGACCGGCAAGGGCAAGCGGCGGGUGUUCGCCUCCAAC |
| | | GGCCAGAUCACCAACCUGCUGCGGGGCUUCUGGGGCCUGCGGAAGGUGCGGGCCG |
| | | AGAACGACCGGCACCACGCCCUGGACGCCGUGGUGGUGGCCUGCUCCACCGUGGC |
| | | CAUGCAGCAGAAGAUCACCCGGUUCGUGCGGUACAAGGAGAUGAACGCCUUCGAC |
| | | GGCAAGACCAUCGACAAGGAGACCGGCAAGGUGCUGCACCAGAAGACCCACUUCC |
| | | CCCAGCCCUGGGAGUUCUUCGCCCAGGAGGUGAUGAUCCGGGUGUUCGGCAAGCC |
| | | CGACGGCAAGCCCGAGUUCGAGGAGGCCGACACCCCCGAGAAGCUGCGGACCCUG |
| | | CUGGCCGAGAAGCUGUCCUCCCGGCCCGAGGCCGUGCACGAGUACGUGACCCCCC |
| | | UGUUCGUGUCCCGGGCCCCCAACCGGAAGAUGUCCGGCGCCCACAAGGACACCCU |
| | | GCGGUCCGCCAAGCGGUUCGUGAAGCACAACGAGAAGAUCUCCGUGAAGCGGGUG |
| | | UGGCUGACCGAGAUCAAGCUGGCCGACCUGGAGAACAUGGUGAACUACAAGAACG |
| | | GCCGGGAGAUCGAGCUGUACGAGGCCCUGAAGGCCCGGCUGGAGGCCUACGGCGG |
| | | CAACGCCAAGCAGGCCUUCGACCCCAAGGACAACCCCUUCUACAAGAAGGGCGGC |
| | | CAGCUGGUGAAGGCCGUGCGGGUGGAGAAGACCCAGGAGUCCGGCGUGCUGCUGA |
| | | ACAAGAAGAACGCCUACACCAUCGCCGACAACGGCGACAUGGUGCGGGUGGACGU |
| | | GUUCUGCAAGGUGGACAAGAAGGGCAAGAACCAGUACUUCAUCGUGCCCAUCUAC |
| | | GCCUGGCAGGUGGCCGAGAACAUCCUGCCCGACAUCGACUGCAAGGGCUACCGGA |
| | | UCGACGACUCCUACACCUUCUGCUUCUCCCUGCACAAGUACGACCUGAUCGCCUU |
| | | CCAGAAGGACGAGAAGUCCAAGGUGGAGUUCGCCUACUACAUCAACUGCGACUCC |
| | | UCCAACGGCCGGUUCUACCUGGCCUGGCACGACAAGGGCUCCAAGGAGCAGCAGU |
| | | UCCGGAUCUCCACCCAGAACCUGGUGCUGAUCCAGAAGUACCAGGUGAACGAGCU |
| | | GGGCAAGGAGAUCCGGCCCUGCCGGCUGAAGAAGCGGCCCCCCGUGCGGUCCGAG |
| | | UCCGCCACCCCCGAGUCCGUGUCCGGCUGGCGGCUGUUCAAGAAGAUCUCCUAGC |
| | | UAGCACCAGCCUCAAGAACACCCGAAUGGAGUCUCUAAGCUACAUAAUACCAACU |
| | | UACACUUUACAAAAUGUUGUCCCCCAAAAUGUAGCCAUUCGUAUCUGCUCCUAAU |
| | | AAAAAGAAAGUUUCUUCACAUUCUCUCGAGAAAAAAAAAAAAUGGAAAAAAAAAA |
| | | AACGGAAAAAAAAAAAAGGUAAAAAAAAAAAAUAUAAAAAAAAAAAACAUAAAAA |
| | | AAAAAAACGAAAAAAAAAAAACGUAAAAAAAAAAAACUCAAAAAAAAAAAAGAUA |
| | | AAAAAAAAAAACCUAAAAAAAAAAAAUGUAAAAAAAAAAAAGGGAAAAAAAAAAA |
| | | ACGCAAAAAAAAAAAACACAAAAAAAAAAAAUGCAAAAAAAAAAAAUCGAAAAAA |
| | | AAAAAAUCUAAAAAAAAAAAACGAAAAAAAAAAAACCCAAAAAAAAAAAAGACAA |
| | | AAAAAAAAAAUAGAAAAAAAAAAAAGUUAAAAAAAAAAAACUGAAAAAAAAAAAA |
| | | UUUAAAAAAAAAAAAUCUAG |
| 635 | mRNA Q encoding | GGGAAGCUCAGAAUAAACGCUCAACUUUGGCCGGAUCUGCCACCAUGGACGGCUC |
| | Nme2Cas 9 | CGGCGGCGGCUCCCCCAAGAAGAAGCGGAAGGUGGGCGGCUCCGGCGGCGGCGCC |
| | | GCCUUCAAGCCCAACCCCAUCAACUACAUCCUGGGCCUGGACAUCGGCAUCGCCU |
| | | CCGUGGGCUGGGCCAUGGUGGAGAUCGACGAGGAGGAGAACCCCAUCCGGCUGAU |
| | | CGACCUGGGCGUGCGGGUGUUCGAGCGGGCCGAGGUGCCCAAGACCGGCGACUCC |
| | | CUGGCCAUGGCCCGGCGGCUGGCCCGGUCCGUGCGGCGGCUGACCCGGCGGCGGG |
| | | CCCACCGGCUGCUGCGGGCCCGGCGGCUGCUGAAGCGGGAGGGCGUGCUGCAGGC |
| | | CGCCGACUUCGACGAGAACGGCCUGAUCAAGUCCCUGCCCAACACCCCCUGGCAG |
| | | CUGCGGGCCGCCGCCCUGGACCGGAAGCUGACCCCCCUGGAGUGGUCCGCCGUGC |
| | | UGCUGCACCUGAUCAAGCACCGGGGCUACCUGUCCCAGCGGAAGAACGAGGGCGA |
| | | GACCGCCGACAAGGAGCUGGGCGCCCUGCUGAAGGGCGUGGCCAACAACGCCCAC |
| | | GCCCUGCAGACCGGCGACUUCCGGACCCCCGCCGAGCUGGCCCUGAACAAGUUCG |
| | | AGAAGGAGUCCGGCCACAUCCGGAACCAGCGGGGCGACUACUCCCACACCUUCUC |
| | | CCGGAAGGACCUGCAGGCCGAGCUGAUCCUGCUGUUCGAGAAGCAGAAGGAGUUC |
| | | GGCAACCCCCACGUGUCCGGCGGCCUGAAGGAGGGCAUCGAGACCCUGCUGAUGA |
| | | CCCAGCGGCCCGCCCUGUCCGGCGACGCCGUGCAGAAGAUGCUGGGCCACUGCAC |
| | | CUUCGAGCCCGCCGAGCCCAAGGCCGCCAAGAACACCUACACCGCCGAGCGGUUC |
| | | AUCUGGCUGACCAAGCUGAACAACCUGCGGAUCCUGGAGCAGGGCUCCGAGCGGC |
| | | CCCUGACCGACACCGAGCGGGCCACCCUGAUGGACGAGCCCUACCGGAAGUCCAA |
| | | GCUGACCUACGCCCAGGCCCGGAAGCUGCUGGGCCUGGAGGACACCGCCUUCUUC |
| | | AAGGGCCUGCGGUACGGCAAGGACAACGCCGAGGCCUCCACCCUGAUGGAGAUGA |
| | | AGGCCUACCACGCCAUCUCCCGGGCCCUGGAGAAGGAGGGCCUGAAGGACAAGAA |
| | | GUCCCCCCUGAACCUGUCCUCCGAGCUGCAGGACGAGAUCGGCACCGCCUUCUCC |
| | | CUGUUCAAGACCGACGAGGACAUCACCGGCCGGCUGAAGGACCGGGUGCAGCCCG |
| | | AGAUCCUGGAGGCCCUGCUGAAGCACAUCUCCUUCGACAAGUUCGUGCAGAUCUC |
| | | CCUGAAGGCCCUGCGGCGGAUCGUGCCCCUGAUGGAGCAGGGCAAGCGGUACGAC |
| | | GAGGCCUGCGCCGAGAUCUACGGCGACCACUACGGCAAGAAGAACACCGAGGAGA |
| | | AGAUCUACCUGCCCCCCAUCCCCGCCGACGAGAUCCGGAACCCCGUGGUGCUGCG |
| | | GGCCCUGUCCCAGGCCCGGAAGGUGAUCAACGGCGUGGUGCGGCGGUACGGCUCC |
| | | CCCGCCCGGAUCCACAUCGAGACCGCCCGGGAGGUGGGCAAGUCCUUCAAGGACC |
| | | GGAAGGAGAUCGAGAAGCGGCAGGAGGAGAACCGGAAGGACCGGGAGAAGGCCGC |
| | | CGCCAAGUUCCGGGAGUACUUCCCCAACUUCGUGGGCGAGCCCAAGUCCAAGGAC |
| | | AUCCUGAAGCUGCGGCUGUACGAGCAGCAGCACGGCAAGUGCCUGUACUCCGGCA |
| | | AGGAGAUCAACCUGGUGCGGCUGAACGAGAAGGGCUACGUGGAGAUCGACCACGC |
| | | CCUGCCCUUCUCCCGGACCUGGGACGACUCCUUCAACAACAAGGUGCUGGUGCUG |
| | | GGCUCCGAGAACCAGAACAAGGGCAACCAGACCCCCUACGAGUACUUCAACGGCA |
| | | AGGACAACUCCCGGGAGUGGCAGGAGUUCAAGGCCCGGGUGGAGACCUCCCGGUU |
| | | CCCCCGGUCCAAGAAGCAGCGGAUCCUGCUGCAGAAGUUCGACGAGGACGGCUUC |
| | | AAGGAGUGCAACCUGAACGACACCCGGUACGUGAACCGGUUCCUGUGCCAGUUCG |
| | | UGGCCGACCACAUCCUGCUGACCGGCAAGGGCAAGCGGCGGGUGUUCGCCUCCAA |
| | | CGGCCAGAUCACCAACCUGCUGCGGGGCUUCUGGGGCCUGCGGAAGGUGCGGGCC |
| | | GAGAACGACCGGCACCACGCCCUGGACGCCGUGGUGGUGGCCUGCUCCACCGUGG |
| | | CCAUGCAGCAGAAGAUCACCCGGUUCGUGCGGUACAAGGAGAUGAACGCCUUCGA |
| | | CGGCAAGACCAUCGACAAGGAGACCGGCAAGGUGCUGCACCAGAAGACCCACUUC |
| | | CCCCAGCCCUGGGAGUUCUUCGCCCAGGAGGUGAUGAUCCGGGUGUUCGGCAAGC |
| | | CCGACGGCAAGCCCGAGUUCGAGGAGGCCGACACCCCCGAGAAGCUGCGGACCCU |
| | | GCUGGCCGAGAAGCUGUCCUCCCGGCCCGAGGCCGUGCACGAGUACGUGACCCCC |
| | | CUGUUCGUGUCCCGGGCCCCCAACCGGAAGAUGUCCGGCGCCCACAAGGACACCC |
| | | UGCGGUCCGCCAAGCGGUUCGUGAAGCACAACGAGAAGAUCUCCGUGAAGCGGGU |
| | | GUGGCUGACCGAGAUCAAGCUGGCCGACCUGGAGAACAUGGUGAACUACAAGAAC |
| | | GGCCGGGAGAUCGAGCUGUACGAGGCCCUGAAGGCCCGGCUGGAGGCCUACGGCG |
| | | GCAACGCCAAGCAGGCCUUCGACCCCAAGGACAACCCCUUCUACAAGAAGGGCGG |
| | | CCAGCUGGUGAAGGCCGUGCGGGUGGAGAAGACCCAGGAGUCCGGCGUGCUGCUG |
| | | AACAAGAAGAACGCCUACACCAUCGCCGACAACGGCGACAUGGUGCGGGUGGACG |
| | | UGUUCUGCAAGGUGGACAAGAAGGGCAAGAACCAGUACUUCAUCGUGCCCAUCUA |
| | | CGCCUGGCAGGUGGCCGAGAACAUCCUGCCCGACAUCGACUGCAAGGGCUACCGG |
| | | AUCGACGACUCCUACACCUUCUGCUUCUCCCUGCACAAGUACGACCUGAUCGCCU |
| | | UCCAGAAGGACGAGAAGUCCAAGGUGGAGUUCGCCUACUACAUCAACUGCGACUC |
| | | CUCCAACGGCCGGUUCUACCUGGCCUGGCACGACAAGGGCUCCAAGGAGCAGCAG |
| | | UUCCGGAUCUCCACCCAGAACCUGGUGCUGAUCCAGAAGUACCAGGUGAACGAGC |
| | | UGGGCAAGGAGAUCCGGCCCUGCCGGCUGAAGAAGCGGCCCCCCGUGCGGUAGCU |
| | | AGCACCAGCCUCAAGAACACCCGAAUGGAGUCUCUAAGCUACAUAAUACCAACUU |
| | | ACACUUUACAAAAUGUUGUCCCCCAAAAUGUAGCCAUUCGUAUCUGCUCCUAAUA |
| | | AAAAGAAAGUUUCUUCACAUUCUCUCGAGAAAAAAAAAAAAUGGAAAAAAAAAAA |
| | | ACGGAAAAAAAAAAAAGGUAAAAAAAAAAAAUAUAAAAAAAAAAAACAUAAAAAA |
| | | AAAAAACGAAAAAAAAAAAACGUAAAAAAAAAAAACUCAAAAAAAAAAAGAUAAA |
| | | AAAAAAAAACCUAAAAAAAAAAAAUGUAAAAAAAAAAAAGGGAAAAAAAAAAAAC |
| | | GCAAAAAAAAAAAACACAAAAAAAAAAAAUGCAAAAAAAAAAAAUCGAAAAAAAA |
| | | AAAAUCUAAAAAAAAAAAACGAAAAAAAAAAAACCCAAAAAAAAAAAAGACAAAA |
| | | AAAAAAAAUAGAAAAAAAAAAAGUUAAAAAAAAAAAACUGAAAAAAAAAAAAUUU |
| | | AAAAAAAAAAAAUCUAG |
| 636 | mRNA R encoding | GGGaagctcagaataaacgctcaactttggccggatctgccaccATGGACGGCTC |
| | Nme2Cas9 base | CGGCGGCGGCTCCCCCAAGAAGAAGCGGAAGGTGGAGGACAAGCGGCCCGCCGCC |
| | editor | ACCAAGAAGGCCGGCCAGGCCAAGAAGAAGAAGGGCGGCTCCGGCGGCGGCGAGG |
| | | CCTCCCCCGCCTCCGGCCCCCGGCACCTGATGGACCCCCACATCTTCACCTCCAA |
| | | CTTCAACAACGGCATCGGCCGGCACAAGACCTACCTGTGCTACGAGGTGGAGCGG |
| | | CTGGACAACGGCACCTCCGTGAAGATGGACCAGCACCGGGGCTTCCTGCACAACC |
| | | AGGCCAAGAACCTGCTGTGCGGCTTCTACGGCCGGCACGCCGAGCTGCGGTTCCT |
| | | GGACCTGGTGCCCTCCCTGCAGCTGGACCCCGCCCAGATCTACCGGGTGACCTGG |
| | | TTCATCTCCTGGTCCCCCTGCTTCTCCTGGGGCTGCGCCGGCGAGGTGCGGGCCT |
| | | TCCTGCAGGAGAACACCCACGTGCGGCTGCGGATCTTCGCCGCCCGGATCTACGA |
| | | CTACGACCCCCTGTACAAGGAGGCCCTGCAGATGCTGCGGGACGCCGGCGCCCAG |
| | | GTGTCCATCATGACCTACGACGAGTTCAAGCACTGCTGGGACACCTTCGTGGACC |
| | | ACCAGGGCTGCCCCTTCCAGCCCTGGGACGGCCTGGACGAGCACTCCCAGGCCCT |
| | | GTCCGGCCGGCTGCGGGCCATCCTGCAGAACCAGGGCAACTCCGGCTCCGAGACC |
| | | CCCGGCACCTCCGAGTCCGCCACCCCCGAGTCCGCAGCGTTCAAACCAAATccca |
| | | tcaactacatcctgggcctggccatcggcatcgcctccgtgggctgggccatggt |
| | | ggagatcgacgaggaggagaaccccatccggctgatcgacctgggcgtgcgggtg |
| | | ttcgagcgggccgaggtgcccaagaccggcgactccctggccatggcccggcggc |
| | | tggcccggtccgtgcggcggctgacccggcggcgggcccaccggctgctgcgggc |
| | | ccggcggctgctgaagcgggagggcgtgctgcaggccgccgacttcgacgagaac |
| | | ggcctgatcaagtccctgcccaacaccccctggcagctgcgggccgccgccctgg |
| | | accggaagctgacccccctggagtggtccgccgtgctgctgcacctgatcaagca |
| | | ccggggctacctgtcccagcggaagaacgagggcgagaccgccgacaaggagctg |
| | | ggcgccctgctgaagggcgtggccaacaacgcccacgccctgcagaccggcgact |
| | | tccggacccccgccgagctggccctgaacaagttcgagaaggagtccggccacat |
| | | ccggaaccagcggggcgactactcccacaccttctcccggaaggacctgcaggcc |
| | | gagctgatcctgctgttcgagaagcagaaggagttcggcaacccccacgtgtccg |
| | | gcggcctgaaggagggcatcgagaccctgctgatgacccagcggcccgccctgtc |
| | | cggcgacgccgtgcagaagatgctgggccactgcaccttcgagcccgccgagccc |
| | | aaggccgccaagaacacctacaccgccgagcggttcatctggctgaccaagctga |
| | | acaacctgcggatcctggagcagggctccgagcggcccctgaccgacaccgagcg |
| | | ggccaccctgatggacgagccctaccggaagtccaagctgacctacgcccaggcc |
| | | cggaagctgctgggcctggaggacaccgccttcttcaagggcctgcggtacggca |
| | | aggacaacgccgaggcctccaccctgatggagatgaaggcctaccacgccatctc |
| | | ccgggccctggagaaggagggcctgaaggacaagaagtcccccctgaacctgtcc |
| | | tccgagctgcaggacgagatcggcaccgccttctccctgttcaagaccgacgagg |
| | | acatcaccggccggctgaaggaccgggtgcagcccgagatcctggaggccctgct |
| | | gaagcacatctccttcgacaagttcgtgcagatctccctgaaggccctgcggcgg |
| | | atcgtgcccctgatggagcagggcaagcggtacgacgaggcctgcgccgagatct |
| | | acggcgaccactacggcaagaagaacaccgaggagaagatctacctgccccccat |
| | | ccccgccgacgagatccggaaccccgtggtgctgcgggccctgtcccaggcccgg |
| | | aaggtgatcaacggcgtggtgcggcggtacggctcccccgcccggatccacatcg |
| | | agaccgcccgggaggtgggcaagtccttcaaggaccggaaggagatcgagaagcg |
| | | gcaggaggagaaccggaaggaccgggagaaggccgccgccaagttccgggagtac |
| | | ttccccaacttcgtgggcgagcccaagtccaaggacatcctgaagctgcggctgt |
| | | acgagcagcagcacggcaagtgcctgtactccggcaaggagatcaacctggtgcg |
| | | gctgaacgagaagggctacgtggagatcgaccacgccctgcccttctcccggacc |
| | | tgggacgactccttcaacaacaaggtgctggtgctgggctccgagaaccagaaca |
| | | agggcaaccagaccccctacgagtacttcaacggcaaggacaactcccgggagtg |
| | | gcaggagttcaaggcccgggtggagacctcccggttcccccggtccaagaagcag |
| | | cggatcctgctgcagaagttcgacgaggacggcttcaaggagtgcaacctgaacg |
| | | acacccggtacgtgaaccgcttcctgtgccagttcgtggccgaccacatcctgct |
| | | gaccggcaagggcaagcggcgggtgttcgcctccaacggccagatcaccaacctg |
| | | ctgcggggcttctggggcctgcggaaggtgcgggccgagaacgaccggcaccacg |
| | | ccctggacgccgtggtggtggcctgctccaccgtggccatgcagcagaagatcac |
| | | ccggttcgtgcggtacaaggagatgaacgccttcgacggcaagaccatcgacaag |
| | | gagaccggcaaggtgctgcaccagaagacccacttcccccagccctgggagttct |
| | | tcgcccaggaggtgatgatccgggtgttcggcaagcccgacggcaagcccgagtt |
| | | cgaggaggccgacacccccgagaagctgcggaccctgctggccgagaagctgtcc |
| | | tcccggcccgaggccgtgcacgagtacgtgacccccctgttcgtgtcccgggccc |
| | | ccaaccggaagatgtccggcgcccacaaggacaccctgcggtccgccaagcggtt |
| | | cgtgaagcacaacgagaagatctccgtgaagcgggtgtggctgaccgagatcaag |
| | | ctggccgacctggagaacatggtgaactacaagaacggccgggagatcgagctgt |
| | | acgaggccctgaaggcccggctggaggcctacggcggcaacgccaagcaggcctt |
| | | cgaccccaaggacaaccccttctacaagaagggcggccagctggtgaaggccgtg |
| | | cgggtggagaagacccaggagtccggcgtgctgctgaacaagaagaacgcctaca |
| | | ccatcgccgacaacggcgacatggtgcgggtggacgtgttctgcaaggtggacaa |
| | | gaagggcaagaaccagtacttcatcgtgcccatctacgcctggcaggtggccgag |
| | | aacatcctgcccgacatcgactgcaagggctaccggatcgacgactcctacacct |
| | | tctgcttctccctgcacaagtacgacctgatcgccttccagaaggacgagaagtc |
| | | caaggtggagttcgcctactacatcaactgcgactcctccaacggccggttctac |
| | | ctggcctggcacgacaagggctccaaggagcagcagttccggatctccacccaga |
| | | acctggtgctgatccagaagtaccaggtgaacgagctgggcaaggagatccggcc |
| | | ctgccggctgaagaagcggccccccgtgcggtccggaaagcggaccgccgacggc |
| | | tccgagttcgagtcccccaagaagaagcggaaggtggagtagTGActagcaccag |
| | | cctcaagaacacccgaatggagtctctaagctacataataccaacttacacttta |
| | | caaaatgttgtcccccaaaatgtagccattcgtatctgctcctaataaaaagaaa |
| | | gtttcttcacattctCTCGAGAAAAAAAAAAAATGGAAAAAAAAAAAACGGAAAA |
| | | AAAAAAAGGTAAAAAAAAAAAATATAAAAAAAAAAACATAAAAAAAAAAAACGAA |
| | | AAAAAAAAAACGTAAAAAAAAAAAACTCAAAAAAAAAAAGATAAAAAAAAAAAAC |
| | | CTAAAAAAAAAAAATGTAAAAAAAAAAAAGGGAAAAAAAAAAACGCAAAAAAAAA |
| | | AAACACAAAAAAAAAAAATGCAAAAAAAAAAAATCGAAAAAAAAAAAATCTAAAA |
| | | AAAAAAAACGAAAAAAAAAAAACCCAAAAAAAAAAAAGACAAAAAAAAAAAATAG |
| | | AAAAAAAAAAAGTTAAAAAAAAAAAACTGAAAAAAAAAAAATTTAAAAAAAAAAA |
| | | AT |
| 637 | mRNA S encoding | GGGAAGCUCAGAAUAAACGCUCAACUUUGGCCGGAUCUGCCACCAUGGACGGCUC |
| | Nme2Cas9 base | CGGCGGCGGCUCCCCCAAGAAGAAGCGGAAGGUGGAGGACAAGCGGCCCGCCGCC |
| | editor | ACCAAGAAGGCCGGCCAGGCCAAGAAGAAGAAGGGCGGCUCCGGCGGCGGCGAGG |
| | | CCUCCCCCGCCUCCGGCCCCCGGCACCUGAUGGACCCCCACAUCUUCACCUCCAA |
| | | CUUCAACAACGGCAUCGGCCGGCACAAGACCUACCUGUGCUACGAGGUGGAGCGG |
| | | CUGGACAACGGCACCUCCGUGAAGAUGGACCAGCACCGGGGCUUCCUGCACAACC |
| | | AGGCCAAGAACCUGCUGUGCGGCUUCUACGGCCGGCACGCCGAGCUGCGGUUCCU |
| | | GGACCUGGUGCCCUCCCUGCAGCUGGACCCCGCCCAGAUCUACCGGGUGACCUGG |
| | | UUCAUCUCCUGGUCCCCCUGCUUCUCCUGGGGCUGCGCCGGCGAGGUGCGGGCCU |
| | | UCCUGCAGGAGAACACCCACGUGCGGCUGCGGAUCUUCGCCGCCCGGAUCUACGA |
| | | CUACGACCCCCUGUACAAGGAGGCCCUGCAGAUGCUGCGGGACGCCGGCGCCCAG |
| | | GUGUCCAUCAUGACCUACGACGAGUUCAAGCACUGCUGGGACACCUUCGUGGACC |
| | | ACCAGGGCUGCCCCUUCCAGCCCUGGGACGGCCUGGACGAGCACUCCCAGGCCCU |
| | | GUCCGGCCGGCUGCGGGCCAUCCUGCAGAACCAGGGCAACUCCGGCUCCGAGACC |
| | | CCCGGCACCUCCGAGUCCGCCACCCCCGAGUCCGCAGCGUUCAAACCAAAUCCCA |
| | | UCAACUACAUCCUGGGCCUGGCCAUCGGCAUCGCCUCCGUGGGCUGGGCCAUGGU |
| | | GGAGAUCGACGAGGAGGAGAACCCCAUCCGGCUGAUCGACCUGGGCGUGCGGGUG |
| | | UUCGAGCGGGCCGAGGUGCCCAAGACCGGCGACUCCCUGGCCAUGGCCCGGCGGC |
| | | UGGCCCGGUCCGUGCGGCGGCUGACCCGGCGGCGGGCCCACCGGCUGCUGCGGGC |
| | | CCGGCGGCUGCUGAAGCGGGAGGGCGUGCUGCAGGCCGCCGACUUCGACGAGAAC |
| | | GGCCUGAUCAAGUCCCUGCCCAACACCCCCUGGCAGCUGCGGGCCGCCGCCCUGG |
| | | ACCGGAAGCUGACCCCCCUGGAGUGGUCCGCCGUGCUGCUGCACCUGAUCAAGCA |
| | | CCGGGGCUACCUGUCCCAGCGGAAGAACGAGGGCGAGACCGCCGACAAGGAGCUG |
| | | GGCGCCCUGCUGAAGGGCGUGGCCAACAACGCCCACGCCCUGCAGACCGGCGACU |
| | | UCCGGACCCCCGCCGAGCUGGCCCUGAACAAGUUCGAGAAGGAGUCCGGCCACAU |
| | | CCGGAACCAGCGGGGCGACUACUCCCACACCUUCUCCCGGAAGGACCUGCAGGCC |
| | | GAGCUGAUCCUGCUGUUCGAGAAGCAGAAGGAGUUCGGCAACCCCCACGUGUCCG |
| | | GCGGCCUGAAGGAGGGCAUCGAGACCCUGCUGAUGACCCAGCGGCCCGCCCUGUC |
| | | CGGCGACGCCGUGCAGAAGAUGCUGGGCCACUGCACCUUCGAGCCCGCCGAGCCC |
| | | AAGGCCGCCAAGAACACCUACACCGCCGAGCGGUUCAUCUGGCUGACCAAGCUGA |
| | | ACAACCUGCGGAUCCUGGAGCAGGGCUCCGAGCGGCCCCUGACCGACACCGAGCG |
| | | GGCCACCCUGAUGGACGAGCCCUACCGGAAGUCCAAGCUGACCUACGCCCAGGCC |
| | | CGGAAGCUGCUGGGCCUGGAGGACACCGCCUUCUUCAAGGGCCUGCGGUACGGCA |
| | | AGGACAACGCCGAGGCCUCCACCCUGAUGGAGAUGAAGGCCUACCACGCCAUCUC |
| | | CCGGGCCCUGGAGAAGGAGGGCCUGAAGGACAAGAAGUCCCCCCUGAACCUGUCC |
| | | UCCGAGCUGCAGGACGAGAUCGGCACCGCCUUCUCCCUGUUCAAGACCGACGAGG |
| | | ACAUCACCGGCCGGCUGAAGGACCGGGUGCAGCCCGAGAUCCUGGAGGCCCUGCU |
| | | GAAGCACAUCUCCUUCGACAAGUUCGUGCAGAUCUCCCUGAAGGCCCUGCGGCGG |
| | | AUCGUGCCCCUGAUGGAGCAGGGCAAGCGGUACGACGAGGCCUGCGCCGAGAUCU |
| | | ACGGCGACCACUACGGCAAGAAGAACACCGAGGAGAAGAUCUACCUGCCCCCCAU |
| | | CCCCGCCGACGAGAUCCGGAACCCCGUGGUGCUGCGGGCCCUGUCCCAGGCCCGG |
| | | AAGGUGAUCAACGGCGUGGUGCGGCGGUACGGCUCCCCCGCCCGGAUCCACAUCG |
| | | AGACCGCCCGGGAGGUGGGCAAGUCCUUCAAGGACCGGAAGGAGAUCGAGAAGCG |
| | | GCAGGAGGAGAACCGGAAGGACCGGGAGAAGGCCGCCGCCAAGUUCCGGGAGUAC |
| | | UUCCCCAACUUCGUGGGCGAGCCCAAGUCCAAGGACAUCCUGAAGCUGCGGCUGU |
| | | ACGAGCAGCAGCACGGCAAGUGCCUGUACUCCGGCAAGGAGAUCAACCUGGUGCG |
| | | GCUGAACGAGAAGGGCUACGUGGAGAUCGACCACGCCCUGCCCUUCUCCCGGACC |
| | | UGGGACGACUCCUUCAACAACAAGGUGCUGGUGCUGGGCUCCGAGAACCAGAACA |
| | | AGGGCAACCAGACCCCCUACGAGUACUUCAACGGCAAGGACAACUCCCGGGAGUG |
| | | GCAGGAGUUCAAGGCCCGGGUGGAGACCUCCCGGUUCCCCCGGUCCAAGAAGCAG |
| | | CGGAUCCUGCUGCAGAAGUUCGACGAGGACGGCUUCAAGGAGUGCAACCUGAACG |
| | | ACACCCGGUACGUGAACCGCUUCCUGUGCCAGUUCGUGGCCGACCACAUCCUGCU |
| | | GACCGGCAAGGGCAAGCGGCGGGUGUUCGCCUCCAACGGCCAGAUCACCAACCUG |
| | | CUGCGGGGCUUCUGGGGCCUGCGGAAGGUGCGGGCCGAGAACGACCGGCACCACG |
| | | CCCUGGACGCCGUGGUGGUGGCCUGCUCCACCGUGGCCAUGCAGCAGAAGAUCAC |
| | | CCGGUUCGUGCGGUACAAGGAGAUGAACGCCUUCGACGGCAAGACCAUCGACAAG |
| | | GAGACCGGCAAGGUGCUGCACCAGAAGACCCACUUCCCCCAGCCCUGGGAGUUCU |
| | | UCGCCCAGGAGGUGAUGAUCCGGGUGUUCGGCAAGCCCGACGGCAAGCCCGAGUU |
| | | CGAGGAGGCCGACACCCCCGAGAAGCUGCGGACCCUGCUGGCCGAGAAGCUGUCC |
| | | UCCCGGCCCGAGGCCGUGCACGAGUACGUGACCCCCCUGUUCGUGUCCCGGGCCC |
| | | CCAACCGGAAGAUGUCCGGCGCCCACAAGGACACCCUGCGGUCCGCCAAGCGGUU |
| | | CGUGAAGCACAACGAGAAGAUCUCCGUGAAGCGGGUGUGGCUGACCGAGAUCAAG |
| | | CUGGCCGACCUGGAGAACAUGGUGAACUACAAGAACGGCCGGGAGAUCGAGCUGU |
| | | ACGAGGCCCUGAAGGCCCGGCUGGAGGCCUACGGCGGCAACGCCAAGCAGGCCUU |
| | | CGACCCCAAGGACAACCCCUUCUACAAGAAGGGCGGCCAGCUGGUGAAGGCCGUG |
| | | CGGGUGGAGAAGACCCAGGAGUCCGGCGUGCUGCUGAACAAGAAGAACGCCUACA |
| | | CCAUCGCCGACAACGGCGACAUGGUGCGGGUGGACGUGUUCUGCAAGGUGGACAA |
| | | GAAGGGCAAGAACCAGUACUUCAUCGUGCCCAUCUACGCCUGGCAGGUGGCCGAG |
| | | AACAUCCUGCCCGACAUCGACUGCAAGGGCUACCGGAUCGACGACUCCUACACCU |
| | | UCUGCUUCUCCCUGCACAAGUACGACCUGAUCGCCUUCCAGAAGGACGAGAAGUC |
| | | CAAGGUGGAGUUCGCCUACUACAUCAACUGCGACUCCUCCAACGGCCGGUUCUAC |
| | | CUGGCCUGGCACGACAAGGGCUCCAAGGAGCAGCAGUUCCGGAUCUCCACCCAGA |
| | | ACCUGGUGCUGAUCCAGAAGUACCAGGUGAACGAGCUGGGCAAGGAGAUCCGGCC |
| | | CUGCCGGCUGAAGAAGCGGCCCCCCGUGCGGUAGUGACUAGCACCAGCCUCAAGA |
| | | ACACCCGAAUGGAGUCUCUAAGCUACAUAAUACCAACUUACACUUUACAAAAUGU |
| | | UGUCCCCCAAAAUGUAGCCAUUCGUAUCUGCUCCUAAUAAAAAGAAAGUUUCUUC |
| | | ACAUUCUCUCGAGAAAAAAAAAAAAUGGAAAAAAAAAAAACGGAAAAAAAAAAAG |
| | | GUAAAAAAAAAAAAUAUAAAAAAAAAAACAUAAAAAAAAAAAACGAAAAAAAAAA |
| | | AACGUAAAAAAAAAAAACUCAAAAAAAAAAAGAUAAAAAAAAAAAACCUAAAAAA |
| | | AAAAAAUGUAAAAAAAAAAAAGGGAAAAAAAAAAACGCAAAAAAAAAAAACACAA |
| | | AAAAAAAAAAUGCAAAAAAAAAAAAUCGAAAAAAAAAAAAUCUAAAAAAAAAAAA |
| | | CGAAAAAAAAAAAACCCAAAAAAAAAAAAGACAAAAAAAAAAAAUAGAAAAAAAA |
| | | AAAGUUAAAAAAAAAAAACUGAAAAAAAAAAAAUUUAAAAAAAAAAAAUCUAG |
| 638 | mRNA T encoding | GGGaagctcagaataaacgctcaactttggccggatctgccaccATGGAGGCCTC |
| | Nme2Cas9 base | CCCCGCCTCCGGCCCCCGGCACCTGATGGACCCCCACATCTTCACCTCCAACTTC |
| | editor | AACAACGGCATCGGCCGGCACAAGACCTACCTGTGCTACGAGGTGGAGCGGCTGG |
| | | ACAACGGCACCTCCGTGAAGATGGACCAGCACCGGGGCTTCCTGCACAACCAGGC |
| | | CAAGAACCTGCTGTGCGGCTTCTACGGCCGGCACGCCGAGCTGCGGTTCCTGGAC |
| | | CTGGTGCCCTCCCTGCAGCTGGACCCCGCCCAGATCTACCGGGTGACCTGGTTCA |
| | | TCTCCTGGTCCCCCTGCTTCTCCTGGGGCTGCGCCGGCGAGGTGCGGGCCTTCCT |
| | | GCAGGAGAACACCCACGTGCGGCTGCGGATCTTCGCCGCCCGGATCTACGACTAC |
| | | GACCCCCTGTACAAGGAGGCCCTGCAGATGCTGCGGGACGCCGGCGCCCAGGTGT |
| | | CCATCATGACCTACGACGAGTTCAAGCACTGCTGGGACACCTTCGTGGACCACCA |
| | | GGGCTGCCCCTTCCAGCCCTGGGACGGCCTGGACGAGCACTCCCAGGCCCTGTCC |
| | | GGCCGGCTGCGGGCCATCCTGCAGAACCAGGGCAACTCCGGCTCCGAGACCCCCG |
| | | GCACCTCCGAGTCCGCCACCCCCGAGTCCGCAGCGTTCAAACCAAATcccatcaa |
| | | ctacatcctgggcctggccatcggcatcgcctccgtgggctgggccatggtggag |
| | | atcgacgaggaggagaaccccatccggctgatcgacctgggcgtgcgggtgttcg |
| | | agcgggccgaggtgcccaagaccggcgactccctggccatggcccggcggctggc |
| | | ccggtccgtgcggcggctgacccggcggcgggcccaccggctgctgcgggcccgg |
| | | cggctgctgaagcgggagggcgtgctgcaggccgccgacttcgacgagaacggcc |
| | | tgatcaagtccctgcccaacaccccctggcagctgcgggccgccgccctggaccg |
| | | gaagctgacccccctggagtggtccgccgtgctgctgcacctgatcaagcaccgg |
| | | ggctacctgtcccagcggaagaacgagggcgagaccgccgacaaggagctgggcg |
| | | ccctgctgaagggcgtggccaacaacgcccacgccctgcagaccggcgacttccg |
| | | gacccccgccgagctggccctgaacaagttcgagaaggagtccggccacatccgg |
| | | aaccagcggggcgactactcccacaccttctcccggaaggacctgcaggccgagc |
| | | tgatcctgctgttcgagaagcagaaggagttcggcaacccccacgtgtccggcgg |
| | | cctgaaggagggcatcgagaccctgctgatgacccagcggcccgccctgtccggc |
| | | gacgccgtgcagaagatgctgggccactgcaccttcgagcccgccgagcccaagg |
| | | ccgccaagaacacctacaccgccgagcggttcatctggctgaccaagctgaacaa |
| | | cctgcggatcctggagcagggctccgagcggcccctgaccgacaccgagcgggcc |
| | | accctgatggacgagcccta |
| | | ccggaagtccaagctgacctacgcccaggcccggaagctgctgggcctggaggac |
| | | accgccttcttcaagggcctgcggtacggcaaggacaacgccgaggcctccaccc |
| | | tgatggagatgaaggcctaccacgccatctcccgggccctggagaaggagggcct |
| | | gaaggacaagaagtcccccctgaacctgtcctccgagctgcaggacgagatcggc |
| | | accgccttctccctgttcaagaccgacgaggacatcaccggccggctgaaggacc |
| | | gggtgcagcccgagatcctggaggccctgctgaagcacatctccttcgacaagtt |
| | | cgtgcagatctccctgaaggccctgcggcggatcgtgcccctgatggagcagggc |
| | | aagcggtacgacgaggcctgcgccgagatctacggcgaccactacggcaagaaga |
| | | acaccgaggagaagatctacctgccccccatccccgccgacgagatccggaaccc |
| | | cgtggtgctgcgggccctgtcccaggcccggaaggtgatcaacggcgtggtgcgg |
| | | cggtacggctcccccgcccggatccacatcgagaccgcccgggaggtgggcaagt |
| | | ccttcaaggaccggaaggagatcgagaagcggcaggaggagaaccggaaggaccg |
| | | ggagaaggccgccgccaagttccgggagtacttccccaacttcgtgggcgagccc |
| | | aagtccaaggacatcctgaagctgcggctgtacgagcagcagcacggcaagtgcc |
| | | tgtactccggcaaggagatcaacctggtgcggctgaacgagaagggctacgtgga |
| | | gatcgaccacgccctgcccttctcccggacctgggacgactccttcaacaacaag |
| | | gtgctggtgctgggctccgagaaccagaacaagggcaaccagaccccctacgagt |
| | | acttcaacggcaaggacaactcccgggagtggcaggagttcaaggcccgggtgga |
| | | gacctcccggttcccccggtccaagaagcagcggatcctgctgcagaagttcgac |
| | | gaggacggcttcaaggagtgcaacctgaacgacacccggtacgtgaaccgcttcc |
| | | tgtgccagttcgtggccgaccacatcctgctgaccggcaagggcaagcggcgggt |
| | | gttcgcctccaacggccagatcaccaacctgctgcggggcttctggggcctgcgg |
| | | aaggtgcgggccgagaacgaccggcaccacgccctggacgccgtggtggtggcct |
| | | gctccaccgtggccatgcagcagaagatcacccggttcgtgcggtacaaggagat |
| | | gaacgccttcgacggcaagaccatcgacaaggagaccggcaaggtgctgcaccag |
| | | aagacccacttcccccagccctgggagttcttcgcccaggaggtgatgatccggg |
| | | tgttcggcaagcccgacggcaagcccgagttcgaggaggccgacacccccgagaa |
| | | gctgcggaccctgctggccgagaagctgtcctcccggcccgaggccgtgcacgag |
| | | tacgtgacccccctgttcgtgtcccgggcccccaaccggaagatgtccggcgccc |
| | | acaaggacaccctgcggtccgccaagcggttcgtgaagcacaacgagaagatctc |
| | | cgtgaagcgggtgtggctgaccgagatcaagctggccgacctggagaacatggtg |
| | | aactacaagaacggccgggagatcgagctgtacgaggccctgaaggcccggctgg |
| | | aggcctacggcggcaacgccaagcaggccttcgaccccaaggacaaccccttcta |
| | | caagaagggcggccagctggtgaaggccgtgcgggtggagaagacccaggagtcc |
| | | ggcgtgctgctgaacaagaagaacgcctacaccatcgccgacaacggcgacatgg |
| | | tgcgggtggacgtgttctgcaaggtggacaagaagggcaagaaccagtacttcat |
| | | cgtgcccatctacgcctggcaggtggccgagaacatcctgcccgacatcgactgc |
| | | aagggctaccggatcgacgactcctacaccttctgcttctccctgcacaagtacg |
| | | acctgatcgccttccagaaggacgagaagtccaaggtggagttcgcctactacat |
| | | caactgcgactcctccaacggccggttctacctggcctggcacgacaagggctcc |
| | | aaggagcagcagttccggatctccacccagaacctggtgctgatccagaagtacc |
| | | aggtgaacgagctgggcaaggagatccggccctgccggctgaagaagcggccccc |
| | | cgtgcggtccggaaagcggaccgccgacggctccgagttcgagtcccccaagaag |
| | | aagcggaaggtggagtagTGActagcaccagcctcaagaacacccgaatggagtc |
| | | tctaagctacataataccaacttacactttacaaaatgttgtcccccaaaatgta |
| | | gccattcgtatctgctcctaataaaaagaaagtttcttcacattctcTCGAGAAA |
| | | AAAAAAAAATGGAAAAAAAAAAAACGGAAAAAAAAAAAGGTAAAAAAAAAAAATA |
| | | TAAAAAAAAAAACATAAAAAAAAAAAACGAAAAAAAAAAAACGTAAAAAAAAAAA |
| | | ACTCAAAAAAAAAAAGATAAAAAAAAAAAACCTAAAAAAAAAAAATGTAAAAAAA |
| | | AAAAAGGGAAAAAAAAAAACGCAAAAAAAAAAAACACAAAAAAAAAAAATGCAAA |
| | | AAAAAAAAATCGAAAAAAAAAAAATCTAAAAAAAAAAAACGAAAAAAAAAAAACC |
| | | CAAAAAAAAAAAAGACAAAAAAAAAAAATAGAAAAAAAAAAAGTTAAAAAAAAAA |
| | | AACTGAAAAAAAAAAAATTTAAAAAAAAAAAAT |
| 639 | mRNA U encoding | GGGaagctcagaataaacgctcaactttggccggatctgccacCATGaagCTGgg |
| | Nme2Cas 9 | cTCCatcGAGttcATCaagGTGaacAAGggcTCCggcTCCggcTCCGGCgccCCC |
| | | gagTCCgccACCgagTCCggcGGCaccTCCaccGAGtccGAGggcTCCgccGGCa |
| | | ccTCCaccGAGtccGAGggctccGCCggcTCCgccGGCtccaccTCCaccGAGga |
| | | gGGCaccTCCaccGAGtccGAGggctccGCCggcACCtccACCgagtccgagGGC |
| | | tccGCCggcACCtccGAGtccgccACCgagTCCggcGGCaccTCCaccGAGtccG |
| | | AGggcTCCtccTCCaccggtgccgccttcaagcccaaccccatcaactacatcct |
| | | gggcctggacatcggcatcgcctccgtgggctgggccatggtggagatcgacgag |
| | | gaggagaaccccatccggctgatcgacctgggcgtgcgggtgttcgagcgggccg |
| | | aggtgcccaagaccggcgactccctggccatggcccggcggctggcccggtccgt |
| | | gcggcggctgacccggcggcgggcccaccggctgctgcgggcccggcggctgctg |
| | | aagcgggagggcgtgctgcaggccgccgacttcgacgagaacggcctgatcaagt |
| | | ccctgcccaacaccccctggcagctgcgggccgccgccctggaccggaagctgac |
| | | ccccctggagtggtccgccgtgctgctgcacctgatcaagcaccggggctacctg |
| | | tcccagcggaagaacgagggcgagaccgccgacaaggagctgggcgccctgctga |
| | | agggcgtggccaacaacgcccacgccctgcagaccggcgacttccggacccccgc |
| | | cgagctggccctgaacaagttcgagaaggagtccggccacatccggaaccagcgg |
| | | ggcgactactcccacaccttctcccggaaggacctgcaggccgagctgatcctgc |
| | | tgttcgagaagcagaaggagttcggcaacccccacgtgtccggcggcctgaagga |
| | | gggcatcgagaccctgctgatgacccagcggcccgccctgtccggcgacgccgtg |
| | | cagaagatgctgggccactgcaccttcgagcccgccgagcccaaggccgccaaga |
| | | acacctacaccgccgagcggttcatctggctgaccaagctgaacaacctgcggat |
| | | cctggagcagggctccgagcggcccctgaccgacaccgagcgggccaccctgatg |
| | | gacgagccctaccggaagtccaagctgacctacgcccaggcccggaagctgctgg |
| | | gcctggaggacaccgccttcttcaagggcctgcggtacggcaaggacaacgccga |
| | | ggcctccaccctgatggagatgaaggcctaccacgccatctcccgggccctggag |
| | | aaggagggcctgaaggacaagaagtcccccctgaacctgtcctccgagctgcagg |
| | | acgagatcggcaccgccttctccctgttcaagaccgacgaggacatcaccggccg |
| | | gctgaaggaccgggtgcagcccgagatcctggaggccctgctgaagcacatctcc |
| | | ttcgacaagttcgtgcagatctccctgaaggccctgcggcggatcgtgcccctga |
| | | tggagcagggcaagcggtacgacgaggcctgcgccgagatctacggcgaccacta |
| | | cggcaagaagaacaccgaggagaagatctacctgccccccatccccgccgacgag |
| | | atccggaaccccgtggtgctgcgggccctgtcccaggcccggaaggtgatcaacg |
| | | gcgtggtgcggcggtacggctcccccgcccggatccacatcgagaccgcccggga |
| | | ggtgggcaagtccttcaaggaccggaaggagatcgagaagcggcaggaggagaac |
| | | cggaaggaccgggagaaggccgccgccaagttccgggagtacttccccaacttcg |
| | | tgggcgagcccaagtccaaggacatcctgaagctgcggctgtacgagcagcagca |
| | | cggcaagtgcctgtactccggcaaggagatcaacctggtgcggctgaacgagaag |
| | | ggctacgtggagatcgaccacgccctgcccttctcccggacctgggacgactcct |
| | | tcaacaacaaggtgctggtgctgggctccgagaaccagaacaagggcaaccagac |
| | | cccctacgagtacttcaacggcaaggacaactcccgggagtggcaggagttcaag |
| | | gcccgggtggagacctcccggttcccccggtccaagaagcagcggatcctgctgc |
| | | agaagttcgacgaggacggcttcaaggagtgcaacctgaacgacacccggtacgt |
| | | gaaccgcttcctgtgccagttcgtggccgaccacatcctgctgaccggcaagggc |
| | | aagcggcgggtgttcgcctccaacggccagatcaccaacctgctgcggggcttct |
| | | ggggcctgcggaaggtgcgggccgagaacgaccggcaccacgccctggacgccgt |
| | | ggtggtggcctgctccaccgtggccatgcagcagaagatcacccggttcgtgcgg |
| | | tacaaggagatgaacgccttcgacggcaagaccatcgacaaggagaccggcaagg |
| | | tgctgcaccagaagacccacttcccccagccctgggagttcttcgcccaggaggt |
| | | gatgatccgggtgttcggcaagcccgacggcaagcccgagttcgaggaggccgac |
| | | acccccgagaagctgcggaccctgctggccgagaagctgtcctcccggcccgagg |
| | | ccgtgcacgagtacgtgacccccctgttcgtgtcccgggcccccaaccggaagat |
| | | gtccggcgcccacaaggacaccctgcggtccgccaagcggttcgtgaagcacaac |
| | | gagaagatctccgtgaagcgggtgtggctgaccgagatcaagctggccgacctgg |
| | | agaacatggtgaactacaagaacggccgggagatcgagctgtacgaggccctgaa |
| | | ggcccggctggaggcctacggcggcaacgccaagcaggccttcgaccccaaggac |
| | | aaccccttctacaagaagggcggccagctggtgaaggccgtgcgggtggagaaga |
| | | cccaggagtccggcgtgctgctgaacaagaagaacgcctacaccatcgccgacaa |
| | | cggcgacatggtgcgggtggacgtgttctgcaaggtggacaagaagggcaagaac |
| | | cagtacttcatcgtgcccatctacgcctggcaggtggccgagaacatcctgcccg |
| | | acatcgactgcaagggctaccggatcgacgactcctacaccttctgcttctccct |
| | | gcacaagtacgacctgatcgccttccagaaggacgagaagtccaaggtggagttc |
| | | gcctactacatcaactgcgactcctccaacggccggttctacctggcctggcacg |
| | | acaagggctccaaggagcagcagttccggatctccacccagaacctggtgctgat |
| | | ccagaagtaccaggtgaacgagctgggcaaggagatccggccctgccggctgaag |
| | | aagcggccccccgtgcggtccggaaagcggaccgccgacggctccgagttcgagt |
| | | cccccaagaagaagcggaaggtggagtgactagcaccagcctcaagaacacccga |
| | | atggagtctctaagctacataataccaacttacactttacaaaatgttgtccccc |
| | | aaaatgtagccattcgtatctgctcctaataaaaagaaagtttcttcacattctc |
| | | TCGAGAAAAAAAAAAAATGGAAAAAAAAAAAACGGAAAAAAAAAAAAGGTAAAAA |
| | | AAAAAAATATAAAAAAAAAAAACATAAAAAAAAAAAACGAAAAAAAAAAAACGTA |
| | | AAAAAAAAAAACTCAAAAAAAAAAAAGATAAAAAAAAAAAACCTAAAAAAAAAAA |
| | | ATGTAAAAAAAAAAAAGGGAAA |
| 640 | Open reading | atgaccggtgccgccttcaagcccaaccccatcaactacatcctgggcctggaca |
| | frame for | tcggcatcgcctccgtgggctgggccatggtggagatcgacgaggaggagaaccc |
| | Nme2Cas9 | catccggctgatcgacctgggcgtgcgggtgttcgagcgggccgaggtgcccaag |
| | encoded | accggcgactccctggccatggcccggcggctggcccggtccgtgcggcggctga |
| | by mRNA A | cccggcggcgggcccaccggctgctgcgggcccggcggctgctgaagcgggaggg |
| | | cgtgctgcaggccgccgacttcgacgagaacggcctgatcaagtccctgcccaac |
| | | accccctggcagctgcgggccgccgccctggaccggaagctgacccccctggagt |
| | | ggtccgccgtgctgctgcacctgatcaagcaccggggctacctgtcccagcggaa |
| | | gaacgagggcgagaccgccgacaaggagctgggcgccctgctgaagggcgtggcc |
| | | aacaacgcccacgccctgcagaccggcgacttccggacccccgccgagctggccc |
| | | tgaacaagttcgagaaggagtccggccacatccggaaccagcggggcgactactc |
| | | ccacaccttctcccggaaggacctgcaggccgagctgatcctgctgttcgagaag |
| | | cagaaggagttcggcaacccccacgtgtccggcggcctgaaggagggcatcgaga |
| | | ccctgctgatgacccagcggcccgccctgtccggcgacgccgtgcagaagatgct |
| | | gggccactgcaccttcgagcccgccgagcccaaggccgccaagaacacctacacc |
| | | gccgagcggttcatctggctgaccaagctgaacaacctgcggatcctggagcagg |
| | | gctccgagcggcccctgaccgacaccgagcgggccaccctgatggacgagcccta |
| | | ccggaagtccaagctgacctacgcccaggcccggaagctgctgggcctggaggac |
| | | accgccttcttcaagggcctgcggtacggcaaggacaacgccgaggcctccaccc |
| | | tgatggagatgaaggcctaccacgccatctcccgggccctggagaaggagggcct |
| | | gaaggacaagaagtcccccctgaacctgtcctccgagctgcaggacgagatcggc |
| | | accgccttctccctgttcaagaccgacgaggacatcaccggccggctgaaggacc |
| | | gggtgcagcccgagatcctggaggccctgctgaagcacatctccttcgacaagtt |
| | | cgtgcagatctccctgaaggccctgcggcggatcgtgcccctgatggagcagggc |
| | | aagcggtacgacgaggcctgcgccgagatctacggcgaccactacggcaagaaga |
| | | acaccgaggagaagatctacctgccccccatccccgccgacgagatccggaaccc |
| | | cgtggtgctgcgggccctgtcccaggcccggaaggtgatcaacggcgtggtgcgg |
| | | cggtacggctcccccgcccggatccacatcgagaccgcccgggaggtgggcaagt |
| | | ccttcaaggaccggaaggagatcgagaagcggcaggaggagaaccggaaggaccg |
| | | ggagaaggccgccgccaagttccgggagtacttccccaacttcgtgggcgagccc |
| | | aagtccaaggacatcctgaagctgcggctgtacgagcagcagcacggcaagtgcc |
| | | tgtactccggcaaggagatcaacctggtgcggctgaacgagaagggctacgtgga |
| | | gatcgaccacgccctgcccttctcccggacctgggacgactccttcaacaacaag |
| | | gtgctggtgctgggctccgagaaccagaacaagggcaaccagaccccctacgagt |
| | | acttcaacggcaaggacaactcccgggagtggcaggagttcaaggcccgggtgga |
| | | gacctcccggttcccccggtccaagaagcagcggatcctgctgcagaagttcgac |
| | | gaggacggcttcaaggagtgcaacctgaacgacacccggtacgtgaaccgcttcc |
| | | tgtgccagttcgtggccgaccacatcctgctgaccggcaagggcaagcggcgggt |
| | | gttcgcctccaacggccagatcaccaacctgctgcggggcttctggggcctgcgg |
| | | aaggtgcgggccgagaacgaccggcaccacgccctggacgccgtggtggtggcct |
| | | gctccaccgtggccatgcagcagaagatcacccggttcgtgcggtacaaggagat |
| | | gaacgccttcgacggcaagaccatcgacaaggagaccggcaaggtgctgcaccag |
| | | aagacccacttcccccagccctgggagttcttcgcccaggaggtgatgatccggg |
| | | tgttcggcaagcccgacggcaagcccgagttcgaggaggccgacacccccgagaa |
| | | gctgcggaccctgctggccgagaagctgtcctcccggcccgaggccgtgcacgag |
| | | tacgtgacccccctgttcgtgtcccgggcccccaaccggaagatgtccggcgccc |
| | | acaaggacaccctgcggtccgccaagcggttcgtgaagcacaacgagaagatctc |
| | | cgtgaagcgggtgtggctgaccgagatcaagctggccgacctggagaacatggtg |
| | | aactacaagaacggccgggagatcgagctgtacgaggccctgaaggcccggctgg |
| | | aggcctacggcggcaacgccaagcaggccttcgaccccaaggacaaccccttcta |
| | | caagaagggcggccagctggtgaaggccgtgcgggtggagaagacccaggagtcc |
| | | ggcgtgctgctgaacaagaagaacgcctacaccatcgccgacaacggcgacatgg |
| | | tgcgggtggacgtgttctgcaaggtggacaagaagggcaagaaccagtacttcat |
| | | cgtgcccatctacgcctggcaggtggccgagaacatcctgcccgacatcgactgc |
| | | aagggctaccggatcgacgactcctacaccttctgcttctccctgcacaagtacg |
| | | acctgatcgccttccagaaggacgagaagtccaaggtggagttcgcctactacat |
| | | caactgcgactcctccaacggccggttctacctggcctggcacgacaagggctcc |
| | | aaggagcagcagttccggatctccacccagaacctggtgctgatccagaagtacc |
| | | aggtgaacgagctgggcaaggagatccggccctgccggctgaagaagcggccccc |
| | | cgtgcggtccggaaagcggaccgccgacggctccgagttcgagtcccccaagaag |
| | | aagcggaaggtggagtag |
| 641 | Open reading | atgaccggtgccgccttcaagcccaaccccatcaactacatcctgggcctggaca |
| | frame for | tcggcatcgcctccgtgggctgggccatggtggagatcgacgaggaggagaaccc |
| | Nme2Cas9 | catccggctgatcgacctgggcgtgcgggtgttcgagcgggccgaggtgcccaag |
| | encoded | accggcgactccctggccatggcccggcggctggcccggtccgtgcggcggctga |
| | by mRNA B | cccggcggcgggcccaccggctgctgcgggcccggcggctgctgaagcgggaggg |
| | | cgtgctgcaggccgccgacttcgacgagaacggcctgatcaagtccctgcccaac |
| | | accccctggcagctgcgggccgccgccctggaccggaagctgacccccctggagt |
| | | ggtccgccgtgctgctgcacctgatcaagcaccggggctacctgtcccagcggaa |
| | | gaacgagggcgagaccgccgacaaggagctgggcgccctgctgaagggcgtggcc |
| | | aacaacgcccacgccctgcagaccggcgacttccggacccccgccgagctggccc |
| | | tgaacaagttcgagaaggagtccggccacatccggaaccagcggggcgactactc |
| | | ccacaccttctcccggaaggacctgcaggccgagctgatcctgctgttcgagaag |
| | | cagaaggagttcggcaacccccacgtgtccggcggcctgaaggagggcatcgaga |
| | | ccctgctgatgacccagcggcccgccctgtccggcgacgccgtgcagaagatgct |
| | | gggccactgcaccttcgagcccgccgagcccaaggccgccaagaacacctacacc |
| | | gccgagcggttcatctggctgaccaagctgaacaacctgcggatcctggagcagg |
| | | gctccgagcggcccctgaccgacaccgagcgggccaccctgatggacgagcccta |
| | | ccggaagtccaagctgacctacgcccaggcccggaagctgctgggcctggaggac |
| | | accgccttcttcaagggcctgcggtacggcaaggacaacgccgaggcctccaccc |
| | | tgatggagatgaaggcctaccacgccatctcccgggccctggagaaggagggcct |
| | | gaaggacaagaagtcccccctgaacctgtcctccgagctgcaggacgagatcggc |
| | | accgccttctccctgttcaagaccgacgaggacatcaccggccggctgaaggacc |
| | | gggtgcagcccgagatcctggaggccctgctgaagcacatctccttcgacaagtt |
| | | cgtgcagatctccctgaaggccctgcggcggatcgtgcccctgatggagcagggc |
| | | aagcggtacgacgaggcctgcgccgagatctacggcgaccactacggcaagaaga |
| | | acaccgaggagaagatctacctgccccccatccccgccgacgagatccggaaccc |
| | | cgtggtgctgcgggccctgtcccaggcccggaaggtgatcaacggcgtggtgcgg |
| | | cggtacggctcccccgcccggatccacatcgagaccgcccgggaggtgggcaagt |
| | | ccttcaaggaccggaaggagatcgagaagcggcaggaggagaaccggaaggaccg |
| | | ggagaaggccgccgccaagttccgggagtacttccccaacttcgtgggcgagccc |
| | | aagtccaaggacatcctgaagctgcggctgtacgagcagcagcacggcaagtgcc |
| | | tgtactccggcaaggagatcaacctggtgcggctgaacgagaagggctacgtgga |
| | | gatcgaccacgccctgcccttctcccggacctgggacgactccttcaacaacaag |
| | | gtgctggtgctgggctccgagaaccagaacaagggcaaccagaccccctacgagt |
| | | acttcaacggcaaggacaactcccgggagtggcaggagttcaaggcccgggtgga |
| | | gacctcccggttcccccggtccaagaagcagcggatcctgctgcagaagttcgac |
| | | gaggacggcttcaaggagtgcaacctgaacgacacccggtacgtgaaccgcttcc |
| | | tgtgccagttcgtggccgaccacatcctgctgaccggcaagggcaagcggcgggt |
| | | gttcgcctccaacggccagatcaccaacctgctgcggggcttctggggcctgcgg |
| | | aaggtgcgggccgagaacgaccggcaccacgccctggacgccgtggtggtggcct |
| | | gctccaccgtggccatgcagcagaagatcacccggttcgtgcggtacaaggagat |
| | | gaacgccttcgacggcaagaccatcgacaaggagaccggcaaggtgctgcaccag |
| | | aagacccacttcccccagccctgggagttcttcgcccaggaggtgatgatccggg |
| | | tgttcggcaagcccgacggcaagcccgagttcgaggaggccgacacccccgagaa |
| | | gctgcggaccctgctggccgagaagctgtcctcccggcccgaggccgtgcacgag |
| | | tacgtgacccccctgttcgtgtcccgggcccccaaccggaagatgtccggcgccc |
| | | acaaggacaccctgcggtccgccaagcggttcgtgaagcacaacgagaagatctc |
| | | cgtgaagcgggtgtggctgaccgagatcaagctggccgacctggagaacatggtg |
| | | aactacaagaacggccgggagatcgagctgtacgaggccctgaaggcccggctgg |
| | | aggcctacggcggcaacgccaagcaggccttcgaccccaaggacaaccccttcta |
| | | caagaagggcggccagctggtgaaggccgtgcgggtggagaagacccaggagtcc |
| | | ggcgtgctgctgaacaagaagaacgcctacaccatcgccgacaacggcgacatgg |
| | | tgcgggtggacgtgttctgcaaggtggacaagaagggcaagaaccagtacttcat |
| | | cgtgcccatctacgcctggcaggtggccgagaacatcctgcccgacatcgactgc |
| | | aagggctaccggatcgacgactcctacaccttctgcttctccctgcacaagtacg |
| | | acctgatcgccttccagaaggacgagaagtccaaggtggagttcgcctactacat |
| | | caactgcgactcctccaacggccggttctacctggcctggcacgacaagggctcc |
| | | aaggagcagcagttccggatctccacccagaacctggtgctgatccagaagtacc |
| | | aggtgaacgagctgggcaaggagatccggccctgccggctgaagaagcggccccc |
| | | cgtgcggtccggaaagcggaccgccgacggctccgagttcgagtcccccaagaag |
| | | aagcggaaggtggagtag |
| 642 | Open reading | atgaccggtgccgccttcaagcccaaccccatcaactacatcctgggcctggaca |
| | frame for | tcggcatcgcctccgtgggctgggccatggtggagatcgacgaggaggagaaccc |
| | Nme2Cas9 | catccggctgatcgacctgggcgtgcgggtgttcgagcgggccgaggtgcccaag |
| | encoded | accggcgactccctggccatggcccggcggctggcccggtccgtgcggcggctga |
| | by mRNA C | cccggcggcgggcccaccggctgctgcgggcccggcggctgctgaagcgggaggg |
| | | cgtgctgcaggccgccgacttcgacgagaacggcctgatcaagtccctgcccaac |
| | | accccctggcagctgcgggccgccgccctggaccggaagctgacccccctggagt |
| | | ggtccgccgtgctgctgcacctgatcaagcaccggggctacctgtcccagcggaa |
| | | gaacgagggcgagaccgccgacaaggagctgggcgccctgctgaagggcgtggcc |
| | | aacaacgcccacgccctgcagaccggcgacttccggacccccgccgagctggccc |
| | | tgaacaagttcgagaaggagtccggccacatccggaaccagcggggcgactactc |
| | | ccacaccttctcccggaaggacctgcaggccgagctgatcctgctgttcgagaag |
| | | cagaaggagttcggcaacccccacgtgtccggcggcctgaaggagggcatcgaga |
| | | ccctgctgatgacccagcggcccgccctgtccggcgacgccgtgcagaagatgct |
| | | gggccactgcaccttcgagcccgccgagcccaaggccgccaagaacacctacacc |
| | | gccgagcggttcatctggctgaccaagctgaacaacctgcggatcctggagcagg |
| | | gctccgagcggcccctgaccgacaccgagcgggccaccctgatggacgagcccta |
| | | ccggaagtccaagctgacctacgcccaggcccggaagctgctgggcctggaggac |
| | | accgccttcttcaagggcctgcggtacggcaaggacaacgccgaggcctccaccc |
| | | tgatggagatgaaggcctaccacgccatctcccgggccctggagaaggagggcct |
| | | gaaggacaagaagtcccccctgaacctgtcctccgagctgcaggacgagatcggc |
| | | accgccttctccctgttcaagaccgacgaggacatcaccggccggctgaaggacc |
| | | gggtgcagcccgagatcctggaggccctgctgaagcacatctccttcgacaagtt |
| | | cgtgcagatctccctgaaggccctgcggcggatcgtgcccctgatggagcagggc |
| | | aagcggtacgacgaggcctgcgccgagatctacggcgaccactacggcaagaaga |
| | | acaccgaggagaagatctacctgccccccatccccgccgacgagatccggaaccc |
| | | cgtggtgctgcgggccctgtcccaggcccggaaggtgatcaacggcgtggtgcgg |
| | | cggtacggctcccccgcccggatccacatcgagaccgcccgggaggtgggcaagt |
| | | ccttcaaggaccggaaggagatcgagaagcggcaggaggagaaccggaaggaccg |
| | | ggagaaggccgccgccaagttccgggagtacttccccaacttcgtgggcgagccc |
| | | aagtccaaggacatcctgaagctgcggctgtacgagcagcagcacggcaagtgcc |
| | | tgtactccggcaaggagatcaacctggtgcggctgaacgagaagggctacgtgga |
| | | gatcgaccacgccctgcccttctcccggacctgggacgactccttcaacaacaag |
| | | gtgctggtgctgggctccgagaaccagaacaagggcaaccagaccccctacgagt |
| | | acttcaacggcaaggacaactcccgggagtggcaggagttcaaggcccgggtgga |
| | | gacctcccggttcccccggtccaagaagcagcggatcctgctgcagaagttcgac |
| | | gaggacggcttcaaggagtgcaacctgaacgacacccggtacgtgaaccgcttcc |
| | | tgtgccagttcgtggccgaccacatcctgctgaccggcaagggcaagcggcgggt |
| | | gttcgcctccaacggccagatcaccaacctgctgcggggcttctggggcctgcgg |
| | | aaggtgcgggccgagaacgaccggcaccacgccctggacgccgtggtggtggcct |
| | | gctccaccgtggccatgcagcagaagatcacccggttcgtgcggtacaaggagat |
| | | gaacgccttcgacggcaagaccatcgacaaggagaccggcaaggtgctgcaccag |
| | | aagacccacttcccccagccctgggagttcttcgcccaggaggtgatgatccggg |
| | | tgttcggcaagcccgacggcaagcccgagttcgaggaggccgacacccccgagaa |
| | | gctgcggaccctgctggccgagaagctgtcctcccggcccgaggccgtgcacgag |
| | | tacgtgacccccctgttcgtgtcccgggcccccaaccggaagatgtccggcgccc |
| | | acaaggacaccctgcggtccgccaagcggttcgtgaagcacaacgagaagatctc |
| | | cgtgaagcgggtgtggctgaccgagatcaagctggccgacctggagaacatggtg |
| | | aactacaagaacggccgggagatcgagctgtacgaggccctgaaggcccggctgg |
| | | aggcctacggcggcaacgccaagcaggccttcgaccccaaggacaaccccttcta |
| | | caagaagggcggccagctggtgaaggccgtgcgggtggagaagacccaggagtcc |
| | | ggcgtgctgctgaacaagaagaacgcctacaccatcgccgacaacggcgacatgg |
| | | tgcgggtggacgtgttctgcaaggtggacaagaagggcaagaaccagtacttcat |
| | | cgtgcccatctacgcctggcaggtggccgagaacatcctgcccgacatcgactgc |
| | | aagggctaccggatcgacgactcctacaccttctgcttctccctgcacaagtacg |
| | | acctgatcgccttccagaaggacgagaagtccaaggtggagttcgcctactacat |
| | | caactgcgactcctccaacggccggttctacctggcctggcacgacaagggctcc |
| | | aaggagcagcagttccggatctccacccagaacctggtgctgatccagaagtacc |
| | | aggtgaacgagctgggcaaggagatccggccctgccggctgaagaagcggccccc |
| | | cgtgcggtccggaaagcggaccgccgacggctccgagttcgagtcccccaagaag |
| | | aagcggaaggtggagtag |
| 643 | Open reading | atgaccggtgccgccttcaagcccaaccccatcaactacatcctgggcctggaca |
| | frame for | tcggcatcgcctccgtgggctgggccatggtggagatcgacgaggaggagaaccc |
| | Nme2Cas9 | catccggctgatcgacctgggcgtgcgggtgttcgagcgggccgaggtgcccaag |
| | encoded | accggcgactccctggccatggcccggcggctggcccggtccgtgcggcggctga |
| | by mRNA D | cccggcggcgggcccaccggctgctgcgggcccggcggctgctgaagcgggaggg |
| | | cgtgctgcaggccgccgacttcgacgagaacggcctgatcaagtccctgcccaac |
| | | accccctggcagctgcgggccgccgccctggaccggaagctgacccccctggagt |
| | | ggtccgccgtgctgctgcacctgatcaagcaccggggctacctgtcccagcggaa |
| | | gaacgagggcgagaccgccgacaaggagctgggcgccctgctgaagggcgtggcc |
| | | aacaacgcccacgccctgcagaccggcgacttccggacccccgccgagctggccc |
| | | tgaacaagttcgagaaggagtccggccacatccggaaccagcggggcgactactc |
| | | ccacaccttctcccggaaggacctgcaggccgagctgatcctgctgttcgagaag |
| | | cagaaggagttcggcaacccccacgtgtccggcggcctgaaggagggcatcgaga |
| | | ccctgctgatgacccagcggcccgccctgtccggcgacgccgtgcagaagatgct |
| | | gggccactgcaccttcgagcccgccgagcccaaggccgccaagaacacctacacc |
| | | gccgagcggttcatctggctgaccaagctgaacaacctgcggatcctggagcagg |
| | | gctccgagcggcccctgaccgacaccgagcgggccaccctgatggacgagcccta |
| | | ccggaagtccaagctgacctacgcccaggcccggaagctgctgggcctggaggac |
| | | accgccttcttcaagggcctgcggtacggcaaggacaacgccgaggcctccaccc |
| | | tgatggagatgaaggcctaccacgccatctcccgggccctggagaaggagggcct |
| | | gaaggacaagaagtcccccctgaacctgtcctccgagctgcaggacgagatcggc |
| | | accgccttctccctgttcaagaccgacgaggacatcaccggccggctgaaggacc |
| | | gggtgcagcccgagatcctggaggccctgctgaagcacatctccttcgacaagtt |
| | | cgtgcagatctccctgaaggccctgcggcggatcgtgcccctgatggagcagggc |
| | | aagcggtacgacgaggcctgcgccgagatctacggcgaccactacggcaagaaga |
| | | acaccgaggagaagatctacctgccccccatccccgccgacgagatccggaaccc |
| | | cgtggtgctgcgggccctgtcccaggcccggaaggtgatcaacggcgtggtgcgg |
| | | cggtacggctcccccgcccggatccacatcgagaccgcccgggaggtgggcaagt |
| | | ccttcaaggaccggaaggagatcgagaagcggcaggaggagaaccggaaggaccg |
| | | ggagaaggccgccgccaagttccgggagtacttccccaacttcgtgggcgagccc |
| | | aagtccaaggacatcctgaagctgcggctgtacgagcagcagcacggcaagtgcc |
| | | tgtactccggcaaggagatcaacctggtgcggctgaacgagaagggctacgtgga |
| | | gatcgaccacgccctgcccttctcccggacctgggacgactccttcaacaacaag |
| | | gtgctggtgctgggctccgagaaccagaacaagggcaaccagaccccctacgagt |
| | | acttcaacggcaaggacaactcccgggagtggcaggagttcaaggcccgggtgga |
| | | gacctcccggttcccccggtccaagaagcagcggatcctgctgcagaagttcgac |
| | | gaggacggcttcaaggagtgcaacctgaacgacacccggtacgtgaaccgcttcc |
| | | tgtgccagttcgtggccgaccacatcctgctgaccggcaagggcaagcggcgggt |
| | | gttcgcctccaacggccagatcaccaacctgctgcggggcttctggggcctgcgg |
| | | aaggtgcgggccgagaacgaccggcaccacgccctggacgccgtggtggtggcct |
| | | gctccaccgtggccatgcagcagaagatcacccggttcgtgcggtacaaggagat |
| | | gaacgccttcgacggcaagaccatcgacaaggagaccggcaaggtgctgcaccag |
| | | aagacccacttcccccagccctgggagttcttcgcccaggaggtgatgatccggg |
| | | tgttcggcaagcccgacggcaagcccgagttcgaggaggccgacacccccgagaa |
| | | gctgcggaccctgctggccgagaagctgtcctcccggcccgaggccgtgcacgag |
| | | tacgtgacccccctgttcgtgtcccgggcccccaaccggaagatgtccggcgccc |
| | | acaaggacaccctgcggtccgccaagcggttcgtgaagcacaacgagaagatctc |
| | | cgtgaagcgggtgtggctgaccgagatcaagctggccgacctggagaacatggtg |
| | | aactacaagaacggccgggagatcgagctgtacgaggccctgaaggcccggctgg |
| | | aggcctacggcggcaacgccaagcaggccttcgaccccaaggacaaccccttcta |
| | | caagaagggcggccagctggtgaaggccgtgcgggtggagaagacccaggagtcc |
| | | ggcgtgctgctgaacaagaagaacgcctacaccatcgccgacaacggcgacatgg |
| | | tgcgggtggacgtgttctgcaaggtggacaagaagggcaagaaccagtacttcat |
| | | cgtgcccatctacgcctggcaggtggccgagaacatcctgcccgacatcgactgc |
| | | aagggctaccggatcgacgactcctacaccttctgcttctccctgcacaagtacg |
| | | acctgatcgccttccagaaggacgagaagtccaaggtggagttcgcctactacat |
| | | caactgcgactcctccaacggccggttctacctggcctggcacgacaagggctcc |
| | | aaggagcagcagttccggatctccacccagaacctggtgctgatccagaagtacc |
| | | aggtgaacgagctgggcaaggagatccggccctgccggctgaagaagcggccccc |
| | | cgtgcggtccggaaagcggaccgccgacggctccgagttcgagtcccccaagaag |
| | | aagcggaaggtggagtag |
| 644 | Open reading | ATGgaggcctcccccgcctccggcccccggcacctgatggacccccacatcttca |
| | frame for | cctccAACTTCAACAACggcATCggccggCACAAGaccTACCTGTGCTACgaggt |
| | SpyCas9 base | ggagcggCTGGACAACggcacctccgtgAAGATGGACCAGCACcggggcTTCCTG |
| | editor encoded | CACAACCAGgccAAGAACCTGCTGTGCggcTTCTACggccggCACgccgagCTGc |
| | by mRNA E | ggTTCCTGGACCTGgtgccctccCTGCAGCTGGACcccgccCAGATCTACcgggt |
| | | gaccTGGTTCATCtccTGGtcccccTGCTTCtccTGGggcTGCgccggcgaggtg |
| | | cgggccTTCCTGCAGgagAACaccCACgtgcggCTGcggATCTTCgccgcccggA |
| | | TCTACGACTACGACcccCTGTACAAGgaggccCTGCAGATGCTGcggGACgccgg |
| | | cgccCAGgtgtccATCATGaccTACGACgagTTCAAGCACTGCTGGGACaccTTC |
| | | gtgGACCACCAGggcTGCCCCTTCCAGcccTGGGACggcCTGGACgagCACtccC |
| | | AGgccCTGtccggccggCTGcgggccATCCTGCAGAACCAGggcAACtccggctc |
| | | cgagacccccggcacctccgagtccgccacccccgagtccgacaagaagtactcc |
| | | atcggcctggCcatcggcaccaactccgtgggctgggccgtgatcaccgacgagt |
| | | acaaggtgccctccaagaagttcaaggtgctgggcaacaccgaccggcactccat |
| | | caagaagaacctgatcggcgccctgctgttcgactccggcgagaccgccgaggcc |
| | | acccggctgaagcggaccgcccggcggcggtacacccggcggaagaaccggatct |
| | | gctacctgcaggagatcttctccaacgagatggccaaggtggacgactccttctt |
| | | ccaccggctggaggagtccttcctggtggaggaggacaagaagcacgagcggcac |
| | | cccatcttcggcaacatcgtggacgaggtggcctaccacgagaagtaccccacca |
| | | tctaccacctgcggaagaagctggtggactccaccgacaaggccgacctgcggct |
| | | gatctacctggccctggcccacatgatcaagttccggggccacttcctgatcgag |
| | | ggcgacctgaaccccgacaactccgacgtggacaagctgttcatccagctggtgc |
| | | agacctacaaccagctgttcgaggagaaccccatcaacgcctccggcgtggacgc |
| | | caaggccatcctgtccgcccggctgtccaagtcccggcggctggagaacctgatc |
| | | gcccagctgcccggcgagaagaagaacggcctgttcggcaacctgatcgccctgt |
| | | ccctgggcctgacccccaacttcaagtccaacttcgacctggccgaggacgccaa |
| | | gctgcagctgtccaaggacacctacgacgacgacctggacaacctgctggcccag |
| | | atcggcgaccagtacgccgacctgttcctggccgccaagaacctgtccgacgcca |
| | | tcctgctgtccgacatcctgcgggtgaacaccgagatcaccaaggcccccctgtc |
| | | cgcctccatgatcaagcggtacgacgagcaccaccaggacctgaccctgctgaag |
| | | gccctggtgcggcagcagctgcccgagaagtacaaggagatcttcttcgaccagt |
| | | ccaagaacggctacgccggctacatcgacggcggcgcctcccaggaggagttcta |
| | | caagttcatcaagcccatcctggagaagatggacggcaccgaggagctgctggtg |
| | | aagctgaaccgggaggacctgctgcggaagcagcggaccttcgacaacggctcca |
| | | tcccccaccagatccacctgggcgagctgcacgccatcctgcggcggcaggagga |
| | | cttctaccccttcctgaaggacaaccgggagaagatcgagaagatcctgaccttc |
| | | cggatcccctactacgtgggccccctggcccggggcaactcccggttcgcctgga |
| | | tgacccggaagtccgaggagaccatcaccccctggaacttcgaggaggtggtgga |
| | | caagggcgcctccgcccagtccttcatcgagcggatgaccaacttcgacaagaac |
| | | ctgcccaacgagaaggtgctgcccaagcactccctgctgtacgagtacttcaccg |
| | | tgtacaacgagctgaccaaggtgaagtacgtgaccgagggcatgcggaagcccgc |
| | | cttcctgtccggcgagcagaagaaggccatcgtggacctgctgttcaagaccaac |
| | | cggaaggtgaccgtgaagcagctgaaggaggactacttcaagaagatcgagtgct |
| | | tcgactccgtggagatctccggcgtggaggaccggttcaacgcctccctgggcac |
| | | ctaccacgacctgctgaagatcatcaaggacaaggacttcctggacaacgaggag |
| | | aacgaggacatcctggaggacatcgtgctgaccctgaccctgttcgaggaccggg |
| | | agatgatcgaggagcggctgaagacctacgcccacctgttcgacgacaaggtgat |
| | | gaagcagctgaagcggcggcggtacaccggctggggccggctgtcccggaagctg |
| | | atcaacggcatccgggacaagcagtccggcaagaccatcctggacttcctgaagt |
| | | ccgacggcttcgccaaccggaacttcatgcagctgatccacgacgactccctgac |
| | | cttcaaggaggacatccagaaggcccaggtgtccggccagggcgactccctgcac |
| | | gagcacatcgccaacctggccggctcccccgccatcaagaagggcatcctgcaga |
| | | ccgtgaaggtggtggacgagctggtgaaggtgatgggccggcacaagcccgagaa |
| | | catcgtgatcgagatggcccgggagaaccagaccacccagaagggccagaagaac |
| | | tcccgggagcggatgaagcggatcgaggagggcatcaaggagctgggctcccaga |
| | | tcctgaaggagcaccccgtggagaacacccagctgcagaacgagaagctgtacct |
| | | gtactacctgcagaacggccgggacatgtacgtggaccaggagctggacatcaac |
| | | cggctgtccgactacgacgtggaccacatcgtgccccagtccttcctgaaggacg |
| | | actccatcgacaacaaggtgctgacccggtccgacaagaaccggggcaagtccga |
| | | caacgtgccctccgaggaggtggtgaagaagatgaagaactactggcggcagctg |
| | | ctgaacgccaagctgatcacccagcggaagttcgacaacctgaccaaggccgagc |
| | | ggggcggcctgtccgagctggacaaggccggcttcatcaagcggcagctggtgga |
| | | gacccggcagatcaccaagcacgtggcccagatcctggactcccggatgaacacc |
| | | aagtacgacgagaacgacaagctgatccgggaggtgaaggtgatcaccctgaagt |
| | | ccaagctggtgtccgacttccggaaggacttccagttctacaaggtgcgggagat |
| | | caacaactaccaccacgcccacgacgcctacctgaacgccgtggtgggcaccgcc |
| | | ctgatcaagaagtaccccaagctggagtccgagttcgtgtacggcgactacaagg |
| | | tgtacgacgtgcggaagatgatcgccaagtccgagcaggagatcggcaaggccac |
| | | cgccaagtacttcttctactccaacatcatgaacttcttcaagaccgagatcacc |
| | | ctggccaacggcgagatccggaagcggcccctgatcgagaccaacggcgagaccg |
| | | gcgagatcgtgtgggacaagggccgggacttcgccaccgtgcggaaggtgctgtc |
| | | catgccccaggtgaacatcgtgaagaagaccgaggtgcagaccggcggcttctcc |
| | | aaggagtccatcctgcccaagcggaactccgacaagctgatcgcccggaagaagg |
| | | actgggaccccaagaagtacggcggcttcgactcccccaccgtggcctactccgt |
| | | gctggtggtggccaaggtggagaagggcaagtccaagaagctgaagtccgtgaag |
| | | gagctgctgggcatcaccatcatggagcggtcctccttcgagaagaaccccatcg |
| | | acttcctggaggccaagggctacaaggaggtgaagaaggacctgatcatcaagct |
| | | gcccaagtactccctgttcgagctggagaacggccggaagcggatgctggcctcc |
| | | gccggcgagctgcagaagggcaacgagctggccctgccctccaagtacgtgaact |
| | | tcctgtacctggcctcccactacgagaagctgaagggctcccccgaggacaacga |
| | | gcagaagcagctgttcgtggagcagcacaagcactacctggacgagatcatcgag |
| | | cagatctccgagttctccaagcgggtgatcctggccgacgccaacctggacaagg |
| | | tgctgtccgcctacaacaagcaccgggacaagcccatccgggagcaggccgagaa |
| | | catcatccacctgttcaccctgaccaacctgggcgcccccgccgccttcaagtac |
| | | ttcgacaccaccatcgaccggaagcggtacacctccaccaaggaggtgctggacg |
| | | ccaccctgatccaccagtccatcaccggcctgtacgagacccggatcgacctgtc |
| | | ccagctgggcggcgacggcggcggctcccccaagaagaagcggaaggtgTgA |
| 645 | Open reading | ATGGCAGCATTCAAGCCGAACTCGATCAACTACATCCTGGGACTGGACATCGGAA |
| | frame for | TCGCATCGGTCGGATGGGCAATGGTCGAAATCGACGAAGAAGAAAACCCGATCAG |
| | NmelCas9 | ACTGATCGACCTGGGAGTCAGAGTCTTCGAAAGAGCAGAAGTCCCGAAGACAGGA |
| | encoded | GACTCGCTGGCAATGGCAAGAAGACTGGCAAGATCGGTCAGAAGACTGACAAGAA |
| | by mRNA F | GAAGAGCACACAGACTGCTGAGAACAAGAAGACTGCTGAAGAGAGAAGGAGTCCT |
| | | GCAGGCAGCAAACTTCGACGAAAACGGACTGATCAAGTCGCTGCCGAACACACCG |
| | | TGGCAGCTGAGAGCAGCAGCACTGGACAGAAAGCTGACACCGCTGGAATGGTCGG |
| | | CAGTCCTGCTGCACCTGATCAAGCACAGAGGATACCTGTCGCAGAGAAAGAACGA |
| | | AGGAGAAACAGCAGACAAGGAACTGGGAGCACTGCTGAAGGGAGTCGCAGGAAAC |
| | | GCACACGCACTGCAGACAGGAGACTTCAGAACACCGGCAGAACTGGCACTGAACA |
| | | AGTTCGAAAAGGAATCGGGACACATCAGAAACCAGAGATCGGACTACTCGCACAC |
| | | ATTCTCGAGAAAGGACCTGCAGGCAGAACTGATCCTGCTGTTCGAAAAGCAGAAG |
| | | GAATTCGGAAACCCGCACGTCTCGGGAGGACTGAAGGAAGGAATCGAAACACTGC |
| | | TGATGACACAGAGACCGGCACTGTCGGGAGACGCAGTCCAGAAGATGCTGGGACA |
| | | CTGCACATTCGAACCGGCAGAACCGAAGGCAGCAAAGAACACATACACAGCAGAA |
| | | AGATTCATCTGGCTGACAAAGCTGAACAACCTGAGAATCCTGGAACAGGGATCGG |
| | | AAAGACCGCTGACAGACACAGAAAGAGCAACACTGATGGACGAACCGTACAGAAA |
| | | GTCGAAGCTGACATACGCACAGGCAAGAAAGCTGCTGGGACTGGAAGACACAGCA |
| | | TTCTTCAAGGGACTGAGATACGGAAAGGACAACGCAGAAGCATCGACACTGATGG |
| | | AAATGAAGGCATACCACGCAATCTCGAGAGCACTGGAAAAGGAAGGACTGAAGGA |
| | | CAAGAAGTCGCCGCTGAACCTGTCGCCGGAACTGCAGGACGAAATCGGAACAGCA |
| | | TTCTCGCTGTTCAAGACAGACGAAGACATCACAGGAAGACTGAAGGACAGAATCC |
| | | AGCCGGAAATCCTGGAAGCACTGCTGAAGCACATCTCGTTCGACAAGTTCGTCCA |
| | | GATCTCGCTGAAGGCACTGAGAAGAATCGTCCCGCTGATGGAACAGGGAAAGAGA |
| | | TACGACGAAGCATGCGCAGAAATCTACGGAGACCACTACGGAAAGAAGAACACAG |
| | | AAGAAAAGATCTACCTGCCGCCGATCCCGGCAGACGAAATCAGAAACCCGGTCGT |
| | | CCTGAGAGCACTGTCGCAGGCAAGAAAGGTCATCAACGGAGTCGTCAGAAGATAC |
| | | GGATCGCCGGCAAGAATCCACATCGAAACAGCAAGAGAAGTCGGAAAGTCGTTCA |
| | | AGGACAGAAAGGAAATCGAAAAGAGACAGGAAGAAAACAGAAAGGACAGAGAAAA |
| | | GGCAGCAGCAAAGTTCAGAGAATACTTCCCGAACTTCGTCGGAGAACCGAAGTCG |
| | | AAGGACATCCTGAAGCTGAGACTGTACGAACAGCAGCACGGAAAGTGCCTGTACT |
| | | CGGGAAAGGAAATCAACCTGGGAAGACTGAACGAAAAGGGATACGTCGAAATCGA |
| | | CCACGCACTGCCGTTCTCGAGAACATGGGACGACTCGTTCAACAACAAGGTCCTG |
| | | GTCCTGGGATCGGAAAACCAGAACAAGGGAAACCAGACACCGTACGAATACTTCA |
| | | ACGGAAAGGACAACTCGAGAGAATGGCAGGAATTCAAGGCAAGAGTCGAAACATC |
| | | GAGATTCCCGAGATCGAAGAAGCAGAGAATCCTGCTGCAGAAGTTCGACGAAGAC |
| | | GGATTCAAGGAAAGAAACCTGAACGACACAAGATACGTCAACAGATTCCTGTGCC |
| | | AGTTCGTCGCAGACAGAATGAGACTGACAGGAAAGGGAAAGAAGAGAGTCTTCGC |
| | | ATCGAACGGACAGATCACAAACCTGCTGAGAGGATTCTGGGGACTGAGAAAGGTC |
| | | AGAGCAGAAAACGACAGACACCACGCACTGGACGCAGTCGTCGTCGCATGCTCGA |
| | | CAGTCGCAATGCAGCAGAAGATCACAAGATTCGTCAGATACAAGGAAATGAACGC |
| | | ATTCGACGGAAAGACAATCGACAAGGAAACAGGAGAAGTCCTGCACCAGAAGACA |
| | | CACTTCCCGCAGCCGTGGGAATTCTTCGCACAGGAAGTCATGATCAGAGTCTTCG |
| | | GAAAGCCGGACGGAAAGCCGGAATTCGAAGAAGCAGACACACTGGAAAAGCTGAG |
| | | AACACTGCTGGCAGAAAAGCTGTCGTCGAGACCGGAAGCAGTCCACGAATACGTC |
| | | ACACCGCTGTTCGTCTCGAGAGCACCGAACAGAAAGATGTCGGGACAGGGACACA |
| | | TGGAAACAGTCAAGTCGGCAAAGAGACTGGACGAAGGAGTCTCGGTCCTGAGAGT |
| | | CCCGCTGACACAGCTGAAGCTGAAGGACCTGGAAAAGATGGTCAACAGAGAAAGA |
| | | GAACCGAAGCTGTACGAAGCACTGAAGGCAAGACTGGAAGCACACAAGGACGACC |
| | | CGGCAAAGGCATTCGCAGAACCGTTCTACAAGTACGACAAGGCAGGAAACAGAAC |
| | | ACAGCAGGTCAAGGCAGTCAGAGTCGAACAGGTCCAGAAGACAGGAGTCTGGGTC |
| | | AGAAACCACAACGGAATCGCAGACAACGCAACAATGGTCAGAGTAGACGTCTTCG |
| | | AAAAGGGAGACAAGTACTACCTGGTCCCGATCTACTCGTGGCAGGTCGCAAAGGG |
| | | AATCCTGCCGGACAGAGCAGTCGTCCAGGGAAAGGACGAAGAAGACTGGCAGCTG |
| | | ATCGACGACTCGTTCAACTTCAAGTTCTCGCTGCACCCGAACGACCTGGTCGAAG |
| | | TCATCACAAAGAAGGCAAGAATGTTCGGATACTTCGCATCGTGCCACAGAGGAAC |
| | | AGGAAACATCAACATCAGAATCCACGACCTGGACCACAAGATCGGAAAGAACGGA |
| | | ATCCTGGAAGGAATCGGAGTCAAGACAGCACTGTCGTTCCAGAAGTACCAGATCG |
| | | ACGAACTGGGAAAGGAAATCAGACCGTGCAGACTGAAGAAGAGACCGCCGGTCAG |
| | | ATCCGGAAAGAGAACAGCAGACGGATCGGAATTCGAATCGCCGAAGAAGAAGAGA |
| | | AAGGTCGAATGA |
| 646 | Open reading | ATGACCAACCTGTCCGACATCATCGAGAAGGAGACCGGCAAGCAGCTGGTGATCC |
| | frame for UGI | AGGAGTCCATCCTGATGCTGCCCGAGGAGGTGGAGGAGGTGATCGGCAACAAGCC |
| | encoded by mRNA | CGAGTCCGACATCCTGGTGCACACCGCCTACGACGAGTCCACCGACGAGAACGTG |
| | G | ATGCTGCTGACCTCCGACGCCCCCGAGTACAAGCCCTGGGCCCTGGTGATCCAGG |
| | | ACTCCAACGGCGAGAACAAGATCAAGATGCTGTCCGGCGGCTCCAAGCGGACCGC |
| | | CGACGGCTCCGAGTTCGAGTCCCCCAAGAAGAAGCGGAAGGTGGAGTGATAG |
| 647 | Open reading | ATGGCCGCCTTCAAGCCCAACCCCATCAACTACATCCTGGGCCTGGACATCGGCA |
| | frame for | TCGCCTCCGTGGGCTGGGCCATGGTGGAGATCGACGAGGAGGAGAACCCCATCCG |
| | Nme2Cas9 | GCTGATCGACCTGGGCGTGCGGGTGTTCGAGCGGGCCGAGGTGCCCAAGACCGGC |
| | encoded | GACTCCCTGGCCATGGCCCGGCGGCTGGCCCGGTCCGTGCGGCGGCTGACCCGGC |
| | by mRNA H | GGCGGGCCCACCGGCTGCTGCGGGCCCGGCGGCTGCTGAAGCGGGAGGGCGTGCT |
| | | GCAGGCCGCCGACTTCGACGAGAACGGCCTGATCAAGTCCCTGCCCAACACCCCC |
| | | TGGCAGCTGCGGGCCGCCGCCCTGGACCGGAAGCTGACCCCCCTGGAGTGGTCCG |
| | | CCGTGCTGCTGCACCTGATCAAGCACCGGGGCTACCTGTCCCAGCGGAAGAACGA |
| | | GGGCGAGACCGCCGACAAGGAGCTGGGCGCCCTGCTGAAGGGCGTGGCCAACAAC |
| | | GCCCACGCCCTGCAGACCGGCGACTTCCGGACCCCCGCCGAGCTGGCCCTGAACA |
| | | AGTTCGAGAAGGAGTCCGGCCACATCCGGAACCAGCGGGGCGACTACTCCCACAC |
| | | CTTCTCCCGGAAGGACCTGCAGGCCGAGCTGATCCTGCTGTTCGAGAAGCAGAAG |
| | | GAGTTCGGCAACCCCCACGTGTCCGGCGGCCTGAAGGAGGGCATCGAGACCCTGC |
| | | TGATGACCCAGCGGCCCGCCCTGTCCGGCGACGCCGTGCAGAAGATGCTGGGCCA |
| | | CTGCACCTTCGAGCCCGCCGAGCCCAAGGCCGCCAAGAACACCTACACCGCCGAG |
| | | CGGTTCATCTGGCTGACCAAGCTGAACAACCTGCGGATCCTGGAGCAGGGCTCCG |
| | | AGCGGCCCCTGACCGACACCGAGCGGGCCACCCTGATGGACGAGCCCTACCGGAA |
| | | GTCCAAGCTGACCTACGCCCAGGCCCGGAAGCTGCTGGGCCTGGAGGACACCGCC |
| | | TTCTTCAAGGGCCTGCGGTACGGCAAGGACAACGCCGAGGCCTCCACCCTGATGG |
| | | AGATGAAGGCCTACCACGCCATCTCCCGGGCCCTGGAGAAGGAGGGCCTGAAGGA |
| | | CAAGAAGTCCCCCCTGAACCTGTCCTCCGAGCTGCAGGACGAGATCGGCACCGCC |
| | | TTCTCCCTGTTCAAGACCGACGAGGACATCACCGGCCGGCTGAAGGACCGGGTGC |
| | | AGCCCGAGATCCTGGAGGCCCTGCTGAAGCACATCTCCTTCGACAAGTTCGTGCA |
| | | GATCTCCCTGAAGGCCCTGCGGCGGATCGTGCCCCTGATGGAGCAGGGCAAGCGG |
| | | TACGACGAGGCCTGCGCCGAGATCTACGGCGACCACTACGGCAAGAAGAACACCG |
| | | AGGAGAAGATCTACCTGCCCCCCATCCCCGCCGACGAGATCCGGAACCCCGTGGT |
| | | GCTGCGGGCCCTGTCCCAGGCCCGGAAGGTGATCAACGGCGTGGTGCGGCGGTAC |
| | | GGCTCCCCCGCCCGGATCCACATCGAGACCGCCCGGGAGGTGGGCAAGTCCTTCA |
| | | AGGACCGGAAGGAGATCGAGAAGCGGCAGGAGGAGAACCGGAAGGACCGGGAGAA |
| | | GGCCGCCGCCAAGTTCCGGGAGTACTTCCCCAACTTCGTGGGCGAGCCCAAGTCC |
| | | AAGGACATCCTGAAGCTGCGGCTGTACGAGCAGCAGCACGGCAAGTGCCTGTACT |
| | | CCGGCAAGGAGATCAACCTGGTGCGGCTGAACGAGAAGGGCTACGTGGAGATCGA |
| | | CCACGCCCTGCCCTTCTCCCGGACCTGGGACGACTCCTTCAACAACAAGGTGCTG |
| | | GTGCTGGGCTCCGAGAACCAGAACAAGGGCAACCAGACCCCCTACGAGTACTTCA |
| | | ACGGCAAGGACAACTCCCGGGAGTGGCAGGAGTTCAAGGCCCGGGTGGAGACCTC |
| | | CCGGTTCCCCCGGTCCAAGAAGCAGCGGATCCTGCTGCAGAAGTTCGACGAGGAC |
| | | GGCTTCAAGGAGTGCAACCTGAACGACACCCGGTACGTGAACCGGTTCCTGTGCC |
| | | AGTTCGTGGCCGACCACATCCTGCTGACCGGCAAGGGCAAGCGGCGGGTGTTCGC |
| | | CTCCAACGGCCAGATCACCAACCTGCTGCGGGGCTTCTGGGGCCTGCGGAAGGTG |
| | | CGGGCCGAGAACGACCGGCACCACGCCCTGGACGCCGTGGTGGTGGCCTGCTCCA |
| | | CCGTGGCCATGCAGCAGAAGATCACCCGGTTCGTGCGGTACAAGGAGATGAACGC |
| | | CTTCGACGGCAAGACCATCGACAAGGAGACCGGCAAGGTGCTGCACCAGAAGACC |
| | | CACTTCCCCCAGCCCTGGGAGTTCTTCGCCCAGGAGGTGATGATCCGGGTGTTCG |
| | | GCAAGCCCGACGGCAAGCCCGAGTTCGAGGAGGCCGACACCCCCGAGAAGCTGCG |
| | | GACCCTGCTGGCCGAGAAGCTGTCCTCCCGGCCCGAGGCCGTGCACGAGTACGTG |
| | | ACCCCCCTGTTCGTGTCCCGGGCCCCCAACCGGAAGATGTCCGGCGCCCACAAGG |
| | | ACACCCTGCGGTCCGCCAAGCGGTTCGTGAAGCACAACGAGAAGATCTCCGTGAA |
| | | GCGGGTGTGGCTGACCGAGATCAAGCTGGCCGACCTGGAGAACATGGTGAACTAC |
| | | AAGAACGGCCGGGAGATCGAGCTGTACGAGGCCCTGAAGGCCCGGCTGGAGGCCT |
| | | ACGGCGGCAACGCCAAGCAGGCCTTCGACCCCAAGGACAACCCCTTCTACAAGAA |
| | | GGGCGGCCAGCTGGTGAAGGCCGTGCGGGTGGAGAAGACCCAGGAGTCCGGCGTG |
| | | CTGCTGAACAAGAAGAACGCCTACACCATCGCCGACAACGGCGACATGGTGCGGG |
| | | TGGACGTGTTCTGCAAGGTGGACAAGTCCGGCGGCGGCTCCCCCAAGAAGAAGCG |
| | | GAAGGTGTCCGGCGGCTCCGGCAAGAACCAGTACTTCATCGTGCCCATCTACGCC |
| | | TGGCAGGTGGCCGAGAACATCCTGCCCGACATCGACTGCAAGGGCTACCGGATCG |
| | | ACGACTCCTACACCTTCTGCTTCTCCCTGCACAAGTACGACCTGATCGCCTTCCA |
| | | GAAGGACGAGAAGTCCAAGGTGGAGTTCGCCTACTACATCAACTGCGACTCCTCC |
| | | AACGGCCGGTTCTACCTGGCCTGGCACGACAAGGGCTCCAAGGAGCAGCAGTTCC |
| | | GGATCTCCACCCAGAACCTGGTGCTGATCCAGAAGTACCAGGTGAACGAGCTGGG |
| | | CAAGGAGATCCGGCCCTGCCGGCTGAAGAAGCGGCCCCCCGTGCGGTAG |
| 648 | Open reading | ATGGTGCCCAAGAAGAAGCGGAAGGTGGCCGCCTTCAAGCCCAACCCCATCAACT |
| | frame for | ACATCCTGGGCCTGGACATCGGCATCGCCTCCGTGGGCTGGGCCATGGTGGAGAT |
| | Nme2Cas9 | CGACGAGGAGGAGAACCCCATCCGGCTGATCGACCTGGGCGTGCGGGTGTTCGAG |
| | encoded | CGGGCCGAGGTGCCCAAGACCGGCGACTCCCTGGCCATGGCCCGGCGGCTGGCCC |
| | by mRNA I | GGTCCGTGCGGCGGCTGACCCGGCGGCGGGCCCACCGGCTGCTGCGGGCCCGGCG |
| | | GCTGCTGAAGCGGGAGGGCGTGCTGCAGGCCGCCGACTTCGACGAGAACGGCCTG |
| | | ATCAAGTCCCTGCCCAACACCCCCTGGCAGCTGCGGGCCGCCGCCCTGGACCGGA |
| | | AGCTGACCCCCCTGGAGTGGTCCGCCGTGCTGCTGCACCTGATCAAGCACCGGGG |
| | | CTACCTGTCCCAGCGGAAGAACGAGGGCGAGACCGCCGACAAGGAGCTGGGCGCC |
| | | CTGCTGAAGGGCGTGGCCAACAACGCCCACGCCCTGCAGACCGGCGACTTCCGGA |
| | | CCCCCGCCGAGCTGGCCCTGAACAAGTTCGAGAAGGAGTCCGGCCACATCCGGAA |
| | | CCAGCGGGGCGACTACTCCCACACCTTCTCCCGGAAGGACCTGCAGGCCGAGCTG |
| | | ATCCTGCTGTTCGAGAAGCAGAAGGAGTTCGGCAACCCCCACGTGTCCGGCGGCC |
| | | TGAAGGAGGGCATCGAGACCCTGCTGATGACCCAGCGGCCCGCCCTGTCCGGCGA |
| | | CGCCGTGCAGAAGATGCTGGGCCACTGCACCTTCGAGCCCGCCGAGCCCAAGGCC |
| | | GCCAAGAACACCTACACCGCCGAGCGGTTCATCTGGCTGACCAAGCTGAACAACC |
| | | TGCGGATCCTGGAGCAGGGCTCCGAGCGGCCCCTGACCGACACCGAGCGGGCCAC |
| | | CCTGATGGACGAGCCCTACCGGAAGTCCAAGCTGACCTACGCCCAGGCCCGGAAG |
| | | CTGCTGGGCCTGGAGGACACCGCCTTCTTCAAGGGCCTGCGGTACGGCAAGGACA |
| | | ACGCCGAGGCCTCCACCCTGATGGAGATGAAGGCCTACCACGCCATCTCCCGGGC |
| | | CCTGGAGAAGGAGGGCCTGAAGGACAAGAAGTCCCCCCTGAACCTGTCCTCCGAG |
| | | CTGCAGGACGAGATCGGCACCGCCTTCTCCCTGTTCAAGACCGACGAGGACATCA |
| | | CCGGCCGGCTGAAGGACCGGGTGCAGCCCGAGATCCTGGAGGCCCTGCTGAAGCA |
| | | CATCTCCTTCGACAAGTTCGTGCAGATCTCCCTGAAGGCCCTGCGGCGGATCGTG |
| | | CCCCTGATGGAGCAGGGCAAGCGGTACGACGAGGCCTGCGCCGAGATCTACGGCG |
| | | ACCACTACGGCAAGAAGAACACCGAGGAGAAGATCTACCTGCCCCCCATCCCCGC |
| | | CGACGAGATCCGGAACCCCGTGGTGCTGCGGGCCCTGTCCCAGGCCCGGAAGGTG |
| | | ATCAACGGCGTGGTGCGGCGGTACGGCTCCCCCGCCCGGATCCACATCGAGACCG |
| | | CCCGGGAGGTGGGCAAGTCCTTCAAGGACCGGAAGGAGATCGAGAAGCGGCAGGA |
| | | GGAGAACCGGAAGGACCGGGAGAAGGCCGCCGCCAAGTTCCGGGAGTACTTCCCC |
| | | AACTTCGTGGGCGAGCCCAAGTCCAAGGACATCCTGAAGCTGCGGCTGTACGAGC |
| | | AGCAGCACGGCAAGTGCCTGTACTCCGGCAAGGAGATCAACCTGGTGCGGCTGAA |
| | | CGAGAAGGGCTACGTGGAGATCGACCACGCCCTGCCCTTCTCCCGGACCTGGGAC |
| | | GACTCCTTCAACAACAAGGTGCTGGTGCTGGGCTCCGAGAACCAGAACAAGGGCA |
| | | ACCAGACCCCCTACGAGTACTTCAACGGCAAGGACAACTCCCGGGAGTGGCAGGA |
| | | GTTCAAGGCCCGGGTGGAGACCTCCCGGTTCCCCCGGTCCAAGAAGCAGCGGATC |
| | | CTGCTGCAGAAGTTCGACGAGGACGGCTTCAAGGAGTGCAACCTGAACGACACCC |
| | | GGTACGTGAACCGGTTCCTGTGCCAGTTCGTGGCCGACCACATCCTGCTGACCGG |
| | | CAAGGGCAAGCGGCGGGTGTTCGCCTCCAACGGCCAGATCACCAACCTGCTGCGG |
| | | GGCTTCTGGGGCCTGCGGAAGGTGCGGGCCGAGAACGACCGGCACCACGCCCTGG |
| | | ACGCCGTGGTGGTGGCCTGCTCCACCGTGGCCATGCAGCAGAAGATCACCCGGTT |
| | | CGTGCGGTACAAGGAGATGAACGCCTTCGACGGCAAGACCATCGACAAGGAGACC |
| | | GGCAAGGTGCTGCACCAGAAGACCCACTTCCCCCAGCCCTGGGAGTTCTTCGCCC |
| | | AGGAGGTGATGATCCGGGTGTTCGGCAAGCCCGACGGCAAGCCCGAGTTCGAGGA |
| | | GGCCGACACCCCCGAGAAGCTGCGGACCCTGCTGGCCGAGAAGCTGTCCTCCCGG |
| | | CCCGAGGCCGTGCACGAGTACGTGACCCCCCTGTTCGTGTCCCGGGCCCCCAACC |
| | | GGAAGATGTCCGGCGCCCACAAGGACACCCTGCGGTCCGCCAAGCGGTTCGTGAA |
| | | GCACAACGAGAAGATCTCCGTGAAGCGGGTGTGGCTGACCGAGATCAAGCTGGCC |
| | | GACCTGGAGAACATGGTGAACTACAAGAACGGCCGGGAGATCGAGCTGTACGAGG |
| | | CCCTGAAGGCCCGGCTGGAGGCCTACGGCGGCAACGCCAAGCAGGCCTTCGACCC |
| | | CAAGGACAACCCCTTCTACAAGAAGGGCGGCCAGCTGGTGAAGGCCGTGCGGGTG |
| | | GAGAAGACCCAGGAGTCCGGCGTGCTGCTGAACAAGAAGAACGCCTACACCATCG |
| | | CCGACAACGGCGACATGGTGCGGGTGGACGTGTTCTGCAAGGTGGACAAGAAGGG |
| | | CAAGAACCAGTACTTCATCGTGCCCATCTACGCCTGGCAGGTGGCCGAGAACATC |
| | | CTGCCCGACATCGACTGCAAGGGCTACCGGATCGACGACTCCTACACCTTCTGCT |
| | | TCTCCCTGCACAAGTACGACCTGATCGCCTTCCAGAAGGACGAGAAGTCCAAGGT |
| | | GGAGTTCGCCTACTACATCAACTGCGACTCCTCCAACGGCCGGTTCTACCTGGCC |
| | | TGGCACGACAAGGGCTCCAAGGAGCAGCAGTTCCGGATCTCCACCCAGAACCTGG |
| | | TGCTGATCCAGAAGTACCAGGTGAACGAGCTGGGCAAGGAGATCCGGCCCTGCCG |
| | | GCTGAAGAAGCGGCCCCCCGTGCGGTACCCCTACGACGTGCCCGACTACGCCGCC |
| | | GCCCCCGCCGCCAAGAAGAAGAAGCTGGACTAG |
| 649 | Open reading | ATGGCCGCCTTCAAGCCCAACCCCATCAACTACATCCTGGGCCTGGACATCGGCA |
| | frame for | TCGCCTCCGTGGGCTGGGCCATGGTGGAGATCGACGAGGAGGAGAACCCCATCCG |
| | Nme2Cas9 | GCTGATCGACCTGGGCGTGCGGGTGTTCGAGCGGGCCGAGGTGCCCAAGACCGGC |
| | encoded | GACTCCCTGGCCATGGCCCGGCGGCTGGCCCGGTCCGTGCGGCGGCTGACCCGGC |
| | by mRNA J | GGCGGGCCCACCGGCTGCTGCGGGCCCGGCGGCTGCTGAAGCGGGAGGGCGTGCT |
| | | GCAGGCCGCCGACTTCGACGAGAACGGCCTGATCAAGTCCCTGCCCAACACCCCC |
| | | TGGCAGCTGCGGGCCGCCGCCCTGGACCGGAAGCTGACCCCCCTGGAGTGGTCCG |
| | | CCGTGCTGCTGCACCTGATCAAGCACCGGGGCTACCTGTCCCAGCGGAAGAACGA |
| | | GGGCGAGACCGCCGACAAGGAGCTGGGCGCCCTGCTGAAGGGCGTGGCCAACAAC |
| | | GCCCACGCCCTGCAGACCGGCGACTTCCGGACCCCCGCCGAGCTGGCCCTGAACA |
| | | AGTTCGAGAAGGAGTCCGGCCACATCCGGAACCAGCGGGGCGACTACTCCCACAC |
| | | CTTCTCCCGGAAGGACCTGCAGGCCGAGCTGATCCTGCTGTTCGAGAAGCAGAAG |
| | | GAGTTCGGCAACCCCCACGTGTCCGGCGGCCTGAAGGAGGGCATCGAGACCCTGC |
| | | TGATGACCCAGCGGCCCGCCCTGTCCGGCGACGCCGTGCAGAAGATGCTGGGCCA |
| | | CTGCACCTTCGAGCCCGCCGAGCCCAAGGCCGCCAAGAACACCTACACCGCCGAG |
| | | CGGTTCATCTGGCTGACCAAGCTGAACAACCTGCGGATCCTGGAGCAGGGCTCCG |
| | | AGCGGCCCCTGACCGACACCGAGCGGGCCACCCTGATGGACGAGCCCTACCGGAA |
| | | GTCCAAGCTGACCTACGCCCAGGCCCGGAAGCTGCTGGGCCTGGAGGACACCGCC |
| | | TTCTTCAAGGGCCTGCGGTACGGCAAGGACAACGCCGAGGCCTCCACCCTGATGG |
| | | AGATGAAGGCCTACCACGCCATCTCCCGGGCCCTGGAGAAGGAGGGCCTGAAGGA |
| | | CAAGAAGTCCCCCCTGAACCTGTCCTCCGAGCTGCAGGACGAGATCGGCACCGCC |
| | | TTCTCCCTGTTCAAGACCGACGAGGACATCACCGGCCGGCTGAAGGACCGGGTGC |
| | | AGCCCGAGATCCTGGAGGCCCTGCTGAAGCACATCTCCTTCGACAAGTTCGTGCA |
| | | GATCTCCCTGAAGGCCCTGCGGCGGATCGTGCCCCTGATGGAGCAGGGCAAGCGG |
| | | TACGACGAGGCCTGCGCCGAGATCTACGGCGACCACTACGGCAAGAAGAACACCG |
| | | AGGAGAAGATCTACCTGCCCCCCATCCCCGCCGACGAGATCCGGAACCCCGTGGT |
| | | GCTGCGGGCCCTGTCCCAGGCCCGGAAGGTGATCAACGGCGTGGTGCGGCGGTAC |
| | | GGCTCCCCCGCCCGGATCCACATCGAGACCGCCCGGGAGGTGGGCAAGTCCTTCA |
| | | AGGACCGGAAGGAGATCGAGAAGCGGCAGGAGGAGAACCGGAAGGACCGGGAGAA |
| | | GGCCGCCGCCAAGTTCCGGGAGTACTTCCCCAACTTCGTGGGCGAGCCCAAGTCC |
| | | AAGGACATCCTGAAGCTGCGGCTGTACGAGCAGCAGCACGGCAAGTGCCTGTACT |
| | | CCGGCAAGGAGATCAACCTGGTGCGGCTGAACGAGAAGGGCTACGTGGAGATCGA |
| | | CCACGCCCTGCCCTTCTCCCGGACCTGGGACGACTCCTTCAACAACAAGGTGCTG |
| | | GTGCTGGGCTCCGAGAACCAGAACAAGGGCAACCAGACCCCCTACGAGTACTTCA |
| | | ACGGCAAGGACAACTCCCGGGAGTGGCAGGAGTTCAAGGCCCGGGTGGAGACCTC |
| | | CCGGTTCCCCCGGTCCAAGAAGCAGCGGATCCTGCTGCAGAAGTTCGACGAGGAC |
| | | GGCTTCAAGGAGTGCAACCTGAACGACACCCGGTACGTGAACCGGTTCCTGTGCC |
| | | AGTTCGTGGCCGACCACATCCTGCTGACCGGCAAGGGCAAGCGGCGGGTGTTCGC |
| | | CTCCAACGGCCAGATCACCAACCTGCTGCGGGGCTTCTGGGGCCTGCGGAAGGTG |
| | | CGGGCCGAGAACGACCGGCACCACGCCCTGGACGCCGTGGTGGTGGCCTGCTCCA |
| | | CCGTGGCCATGCAGCAGAAGATCACCCGGTTCGTGCGGTACAAGGAGATGAACGC |
| | | CTTCGACGGCAAGACCATCGACAAGGAGACCGGCAAGGTGCTGCACCAGAAGACC |
| | | CACTTCCCCCAGCCCTGGGAGTTCTTCGCCCAGGAGGTGATGATCCGGGTGTTCG |
| | | GCAAGCCCGACGGCAAGCCCGAGTTCGAGGAGGCCGACACCCCCGAGAAGCTGCG |
| | | GACCCTGCTGGCCGAGAAGCTGTCCTCCCGGCCCGAGGCCGTGCACGAGTACGTG |
| | | ACCCCCCTGTTCGTGTCCCGGGCCCCCAACCGGAAGATGTCCGGCGCCCACAAGG |
| | | ACACCCTGCGGTCCGCCAAGCGGTTCGTGAAGCACAACGAGAAGATCTCCGTGAA |
| | | GCGGGTGTGGCTGACCGAGATCAAGCTGGCCGACCTGGAGAACATGGTGAACTAC |
| | | AAGAACGGCCGGGAGATCGAGCTGTACGAGGCCCTGAAGGCCCGGCTGGAGGCCT |
| | | ACGGCGGCAACGCCAAGCAGGCCTTCGACCCCAAGGACAACCCCTTCTACAAGAA |
| | | GGGCGGCCAGCTGGTGAAGGCCGTGCGGGTGGAGAAGACCCAGGAGTCCGGCGTG |
| | | CTGCTGAACAAGAAGAACGCCTACACCATCGCCGACAACGGCGACATGGTGCGGG |
| | | TGGACGTGTTCTGCAAGGTGGACAAGAAGGGCAAGAACCAGTACTTCATCGTGCC |
| | | CATCTACGCCTGGCAGGTGGCCGAGAACATCCTGCCCGACATCGACTGCAAGGGC |
| | | TACCGGATCGACGACTCCTACACCTTCTGCTTCTCCCTGCACAAGTACGACCTGA |
| | | TCGCCTTCCAGAAGGACGAGAAGTCCAAGGTGGAGTTCGCCTACTACATCAACTG |
| | | CGACTCCTCCAACGGCCGGTTCTACCTGGCCTGGCACGACAAGGGCTCCAAGGAG |
| | | CAGCAGTTCCGGATCTCCACCCAGAACCTGGTGCTGATCCAGAAGTACCAGGTGA |
| | | ACGAGCTGGGCAAGGAGATCCGGCCCTGCCGGCTGAAGAAGCGGCCCCCCGTGCG |
| | | G |
| 650 | Open reading | atggccgccttcaagcccaaccccatcaactacatcctgggcctggacatcggca |
| | frame for | tcgcctccgtgggctgggccatggtggagatcgacgaggaggagaaccccatccg |
| | Nme2Cas9 | gctgatcgacctgggcgtgcgggtgttcgagcgggccgaggtgcccaagaccggc |
| | encoded | gactccctggccatggcccggcggctggcccggtccgtgcggcggctgacccggc |
| | by mRNA K | ggcgggcccaccggctgctgcgggcccggcggctgctgaagcgggagggcgtgct |
| | | gcaggccgccgacttcgacgagaacggcctgatcaagtccctgcccaacaccccc |
| | | tggcagctgcgggccgccgccctggaccggaagctgacccccctggagtggtccg |
| | | ccgtgctgctgcacctgatcaagcaccggggctacctgtcccagcggaagaacga |
| | | gggcgagaccgccgacaaggagctgggcgccctgctgaagggcgtggccaacaac |
| | | gcccacgccctgcagaccggcgacttccggacccccgccgagctggccctgaaca |
| | | agttcgagaaggagtccggccacatccggaaccagcggggcgactactcccacac |
| | | cttctcccggaaggacctgcaggccgagctgatcctgctgttcgagaagcagaag |
| | | gagttcggcaacccccacgtgtccggcggcctgaaggagggcatcgagaccctgc |
| | | tgatgacccagcggcccgccctgtccggcgacgccgtgcagaagatgctgggcca |
| | | ctgcaccttcgagcccgccgagcccaaggccgccaagaacacctacaccgccgag |
| | | cggttcatctggctgaccaagctgaacaacctgcggatcctggagcagggctccg |
| | | agcggcccctgaccgacaccgagcgggccaccctgatggacgagccctaccggaa |
| | | gtccaagctgacctacgcccaggcccggaagctgctgggcctggaggacaccgcc |
| | | ttcttcaagggcctgcggtacggcaaggacaacgccgaggcctccaccctgatgg |
| | | agatgaaggcctaccacgccatctcccgggccctggagaaggagggcctgaagga |
| | | caagaagtcccccctgaacctgtcctccgagctgcaggacgagatcggcaccgcc |
| | | ttctccctgttcaagaccgacgaggacatcaccggccggctgaaggaccgggtgc |
| | | agcccgagatcctggaggccctgctgaagcacatctccttcgacaagttcgtgca |
| | | gatctccctgaaggccctgcggcggatcgtgcccctgatggagcagggcaagcgg |
| | | tacgacgaggcctgcgccgagatctacggcgaccactacggcaagaagaacaccg |
| | | aggagaagatctacctgccccccatccccgccgacgagatccggaaccccgtggt |
| | | gctgcgggccctgtcccaggcccggaaggtgatcaacggcgtggtgcggcggtac |
| | | ggctcccccgcccggatccacatcgagaccgcccgggaggtgggcaagtccttca |
| | | aggaccggaaggagatcgagaagcggcaggaggagaaccggaaggaccgggagaa |
| | | ggccgccgccaagttccgggagtacttccccaacttcgtgggcgagcccaagtcc |
| | | aaggacatcctgaagctgcggctgtacgagcagcagcacggcaagtgcctgtact |
| | | ccggcaaggagatcaacctggtgcggctgaacgagaagggctacgtggagatcga |
| | | ccacgccctgcccttctcccggacctgggacgactccttcaacaacaaggtgctg |
| | | gtgctgggctccgagaaccagaacaagggcaaccagaccccctacgagtacttca |
| | | acggcaaggacaactcccgggagtggcaggagttcaaggcccgggggagacctcc |
| | | cggttcccccggtccaagaagcagcggatcctgctgcagaagttcgacgaggacg |
| | | gcttcaaggagtgcaacctgaacgacacccggtacgtgaaccggttcctgtgcca |
| | | gttcgtggccgaccacatcctgctgaccggcaagggcaagcggcgggtgttcgcc |
| | | tccaacggccagatcaccaacctgctgcggggcttctggggcctgcggaaggtgc |
| | | gggccgagaacgaccggcaccacgccctggacgccgtggtggtggcctgctccac |
| | | cgtggccatgcagcagaagatcacccggttcgtgcggtacaaggagatgaacgcc |
| | | ttcgacggcaagaccatcgacaaggagaccggcaaggtgctgcaccagaagaccc |
| | | acttcccccagccctgggagttcttcgcccaggaggtgatgatccgggtgttcgg |
| | | caagcccgacggcaagcccgagttcgaggaggccgacacccccgagaagctgcgg |
| | | accctgctggccgagaagctgtcctcccggcccgaggccgtgcacgagtacgtga |
| | | cccccctgttcgtgtcccgggcccccaaccggaagatgtccggcgcccacaagga |
| | | caccctgcggtccgccaagcggttcgtgaagcacaacgagaagatctccgtgaag |
| | | cgggtgtggctgaccgagatcaagctggccgacctggagaacatggtgaactaca |
| | | agaacggccgggagatcgagctgtacgaggccctgaaggcccggctggaggccta |
| | | cggcggcaacgccaagcaggccttcgaccccaaggacaaccccttctacaagaag |
| | | ggcggccagctggtgaaggccgtgcgggtggagaagacccaggagtccggcgtgc |
| | | tgctgaacaagaagaacgcctacaccatcgccgacaacggcgacatggtgcgggt |
| | | ggacgtgttctgcaaggtggacaagaagggcaagaaccagtacttcatcgtgccc |
| | | atctacgcctggcaggtggccgagaacatcctgcccgacatcgactgcaagggct |
| | | accggatcgacgactcctacaccttctgcttctccctgcacaagtacgacctgat |
| | | cgccttccagaaggacgagaagtccaaggtggagttcgcctactacatcaactgc |
| | | gactcctccaacggccggttctacctggcctggcacgacaagggctccaaggagc |
| | | agcagttccggatctccacccagaacctggtgctgatccagaagtaccaggtgaa |
| | | cgagctgggcaaggagatccggccctgccggctgaagaagcggccccccgtgcgg |
| 651 | Open reading | atgGACGGCTCCGGCGGCGGCTCCCCCAAGAAGAAGCGGAAGGTGGGCGGCTCCG |
| | frame for | GCGGCGGCgccgccttcaagcccaaccccatcaactacatcctgggcctggacat |
| | Nme2Cas9 | cggcatcgcctccgtgggctgggccatggtggagatcgacgaggaggagaacccc |
| | encoded | atccggctgatcgacctgggcgtgcgggtgttcgagcgggccgaggtgcccaaga |
| | by mRNA L | ccggcgactccctggccatggcccggcggctggcccggtccgtgcggcggctgac |
| | | ccggcggcgggcccaccggctgctgcgggcccggcggctgctgaagcgggagggc |
| | | gtgctgcaggccgccgacttcgacgagaacggcctgatcaagtccctgcccaaca |
| | | ccccctggcagctgcgggccgccgccctggaccggaagctgacccccctggagtg |
| | | gtccgccgtgctgctgcacctgatcaagcaccggggctacctgtcccagcggaag |
| | | aacgagggcgagaccgccgacaaggagctgggcgccctgctgaagggcgtggcca |
| | | acaacgcccacgccctgcagaccggcgacttccggacccccgccgagctggccct |
| | | gaacaagttcgagaaggagtccggccacatccggaaccagcggggcgactactcc |
| | | cacaccttctcccggaaggacctgcaggccgagctgatcctgctgttcgagaagc |
| | | agaaggagttcggcaacccccacgtgtccggcggcctgaaggagggcatcgagac |
| | | cctgctgatgacccagcggcccgccctgtccggcgacgccgtgcagaagatgctg |
| | | ggccactgcaccttcgagcccgccgagcccaaggccgccaagaacacctacaccg |
| | | ccgagcggttcatctggctgaccaagctgaacaacctgcggatcctggagcaggg |
| | | ctccgagcggcccctgaccgacaccgagcgggccaccctgatggacgagccctac |
| | | cggaagtccaagctgacctacgcccaggcccggaagctgctgggcctggaggaca |
| | | ccgccttcttcaagggcctgcggtacggcaaggacaacgccgaggcctccaccct |
| | | gatggagatgaaggcctaccacgccatctcccgggccctggagaaggagggcctg |
| | | aaggacaagaagtcccccctgaacctgtcctccgagctgcaggacgagatcggca |
| | | ccgccttctccctgttcaagaccgacgaggacatcaccggccggctgaaggaccg |
| | | ggtgcagcccgagatcctggaggccctgctgaagcacatctccttcgacaagttc |
| | | gtgcagatctccctgaaggccctgcggcggatcgtgcccctgatggagcagggca |
| | | agcggtacgacgaggcctgcgccgagatctacggcgaccactacggcaagaagaa |
| | | caccgaggagaagatctacctgccccccatccccgccgacgagatccggaacccc |
| | | gtggtgctgcgggccctgtcccaggcccggaaggtgatcaacggcgtggtgcggc |
| | | ggtacggctcccccgcccggatccacatcgagaccgcccgggaggtgggcaagtc |
| | | cttcaaggaccggaaggagatcgagaagcggcaggaggagaaccggaaggaccgg |
| | | gagaaggccgccgccaagttccgggagtacttccccaacttcgtgggcgagccca |
| | | agtccaaggacatcctgaagctgcggctgtacgagcagcagcacggcaagtgcct |
| | | gtactccggcaaggagatcaacctggtgcggctgaacgagaagggctacgtggag |
| | | atcgaccacgccctgcccttctcccggacctgggacgactccttcaacaacaagg |
| | | tgctggtgctgggctccgagaaccagaacaagggcaaccagaccccctacgagta |
| | | cttcaacggcaaggacaactcccgggagtggcaggagttcaaggcccgggtggag |
| | | acctcccggttcccccggtccaagaagcagcggatcctgctgcagaagttcgacg |
| | | aggacggcttcaaggagtgcaacctgaacgacacccggtacgtgaaccggttcct |
| | | gtgccagttcgtggccgaccacatcctgctgaccggcaagggcaagcggcgggtg |
| | | ttcgcctccaacggccagatcaccaacctgctgcggggcttctggggcctgcgga |
| | | aggtgcgggccgagaacgaccggcaccacgccctggacgccgtggtggtggcctg |
| | | ctccaccgtggccatgcagcagaagatcacccggttcgtgcggtacaaggagatg |
| | | aacgccttcgacggcaagaccatcgacaaggagaccggcaaggtgctgcaccaga |
| | | agacccacttcccccagccctgggagttcttcgcccaggaggtgatgatccgggt |
| | | gttcggcaagcccgacggcaagcccgagttcgaggaggccgacacccccgagaag |
| | | ctgcggaccctgctggccgagaagctgtcctcccggcccgaggccgtgcacgagt |
| | | acgtgacccccctgttcgtgtcccgggcccccaaccggaagatgtccggcgccca |
| | | caaggacaccctgcggtccgccaagcggttcgtgaagcacaacgagaagatctcc |
| | | gtgaagcgggtgtggctgaccgagatcaagctggccgacctggagaacatggtga |
| | | actacaagaacggccgggagatcgagctgtacgaggccctgaaggcccggctgga |
| | | ggcctacggcggcaacgccaagcaggccttcgaccccaaggacaaccccttctac |
| | | aagaagggcggccagctggtgaaggccgtgcgggtggagaagacccaggagtccg |
| | | gcgtgctgctgaacaagaagaacgcctacaccatcgccgacaacggcgacatggt |
| | | gcgggtggacgtgttctgcaaggtggacaagaagggcaagaaccagtacttcatc |
| | | gtgcccatctacgcctggcaggtggccgagaacatcctgcccgacatcgactgca |
| | | agggctaccggatcgacgactcctacaccttctgcttctccctgcacaagtacga |
| | | cctgatcgccttccagaaggacgagaagtccaaggtggagttcgcctactacatc |
| | | aactgcgactcctccaacggccggttctacctggcctggcacgacaagggctcca |
| | | aggagcagcagttccggatctccacccagaacctggtgctgatccagaagtacca |
| | | ggtgaacgagctgggcaaggagatccggccctgccggctgaagaagcggcccccc |
| | | gtgcggtag |
| 652 | Open reading | ATGGACGGCTCCGGCGGCGGCTCCCCCAAGAAGAAGCGGAAGGTGGGCGGCTCCG |
| | frame for | GCGGCGGCGCCGCCTTCAAGCCCAACCCCATCAACTACATCCTGGGCCTGGACAT |
| | Nme2Cas9 with | CGGCATCGCCTCCGTGGGCTGGGCCATGGTGGAGATCGACGAGGAGGAGAACCCC |
| | HiBiT tag | ATCCGGCTGATCGACCTGGGCGTGCGGGTGTTCGAGCGGGCCGAGGTGCCCAAGA |
| | encoded by mRNA | CCGGCGACTCCCTGGCCATGGCCCGGCGGCTGGCCCGGTCCGTGCGGCGGCTGAC |
| | M | CCGGCGGCGGGCCCACCGGCTGCTGCGGGCCCGGCGGCTGCTGAAGCGGGAGGGC |
| | | GTGCTGCAGGCCGCCGACTTCGACGAGAACGGCCTGATCAAGTCCCTGCCCAACA |
| | | CCCCCTGGCAGCTGCGGGCCGCCGCCCTGGACCGGAAGCTGACCCCCCTGGAGTG |
| | | GTCCGCCGTGCTGCTGCACCTGATCAAGCACCGGGGCTACCTGTCCCAGCGGAAG |
| | | AACGAGGGCGAGACCGCCGACAAGGAGCTGGGCGCCCTGCTGAAGGGCGTGGCCA |
| | | ACAACGCCCACGCCCTGCAGACCGGCGACTTCCGGACCCCCGCCGAGCTGGCCCT |
| | | GAACAAGTTCGAGAAGGAGTCCGGCCACATCCGGAACCAGCGGGGCGACTACTCC |
| | | CACACCTTCTCCCGGAAGGACCTGCAGGCCGAGCTGATCCTGCTGTTCGAGAAGC |
| | | AGAAGGAGTTCGGCAACCCCCACGTGTCCGGCGGCCTGAAGGAGGGCATCGAGAC |
| | | CCTGCTGATGACCCAGCGGCCCGCCCTGTCCGGCGACGCCGTGCAGAAGATGCTG |
| | | GGCCACTGCACCTTCGAGCCCGCCGAGCCCAAGGCCGCCAAGAACACCTACACCG |
| | | CCGAGCGGTTCATCTGGCTGACCAAGCTGAACAACCTGCGGATCCTGGAGCAGGG |
| | | CTCCGAGCGGCCCCTGACCGACACCGAGCGGGCCACCCTGATGGACGAGCCCTAC |
| | | CGGAAGTCCAAGCTGACCTACGCCCAGGCCCGGAAGCTGCTGGGCCTGGAGGACA |
| | | CCGCCTTCTTCAAGGGCCTGCGGTACGGCAAGGACAACGCCGAGGCCTCCACCCT |
| | | GATGGAGATGAAGGCCTACCACGCCATCTCCCGGGCCCTGGAGAAGGAGGGCCTG |
| | | AAGGACAAGAAGTCCCCCCTGAACCTGTCCTCCGAGCTGCAGGACGAGATCGGCA |
| | | CCGCCTTCTCCCTGTTCAAGACCGACGAGGACATCACCGGCCGGCTGAAGGACCG |
| | | GGTGCAGCCCGAGATCCTGGAGGCCCTGCTGAAGCACATCTCCTTCGACAAGTTC |
| | | GTGCAGATCTCCCTGAAGGCCCTGCGGCGGATCGTGCCCCTGATGGAGCAGGGCA |
| | | AGCGGTACGACGAGGCCTGCGCCGAGATCTACGGCGACCACTACGGCAAGAAGAA |
| | | CACCGAGGAGAAGATCTACCTGCCCCCCATCCCCGCCGACGAGATCCGGAACCCC |
| | | GTGGTGCTGCGGGCCCTGTCCCAGGCCCGGAAGGTGATCAACGGCGTGGTGCGGC |
| | | GGTACGGCTCCCCCGCCCGGATCCACATCGAGACCGCCCGGGAGGTGGGCAAGTC |
| | | CTTCAAGGACCGGAAGGAGATCGAGAAGCGGCAGGAGGAGAACCGGAAGGACCGG |
| | | GAGAAGGCCGCCGCCAAGTTCCGGGAGTACTTCCCCAACTTCGTGGGCGAGCCCA |
| | | AGTCCAAGGACATCCTGAAGCTGCGGCTGTACGAGCAGCAGCACGGCAAGTGCCT |
| | | GTACTCCGGCAAGGAGATCAACCTGGTGCGGCTGAACGAGAAGGGCTACGTGGAG |
| | | ATCGACCACGCCCTGCCCTTCTCCCGGACCTGGGACGACTCCTTCAACAACAAGG |
| | | TGCTGGTGCTGGGCTCCGAGAACCAGAACAAGGGCAACCAGACCCCCTACGAGTA |
| | | CTTCAACGGCAAGGACAACTCCCGGGAGTGGCAGGAGTTCAAGGCCCGGGTGGAG |
| | | ACCTCCCGGTTCCCCCGGTCCAAGAAGCAGCGGATCCTGCTGCAGAAGTTCGACG |
| | | AGGACGGCTTCAAGGAGTGCAACCTGAACGACACCCGGTACGTGAACCGGTTCCT |
| | | GTGCCAGTTCGTGGCCGACCACATCCTGCTGACCGGCAAGGGCAAGCGGCGGGTG |
| | | TTCGCCTCCAACGGCCAGATCACCAACCTGCTGCGGGGCTTCTGGGGCCTGCGGA |
| | | AGGTGCGGGCCGAGAACGACCGGCACCACGCCCTGGACGCCGTGGTGGTGGCCTG |
| | | CTCCACCGTGGCCATGCAGCAGAAGATCACCCGGTTCGTGCGGTACAAGGAGATG |
| | | AACGCCTTCGACGGCAAGACCATCGACAAGGAGACCGGCAAGGTGCTGCACCAGA |
| | | AGACCCACTTCCCCCAGCCCTGGGAGTTCTTCGCCCAGGAGGTGATGATCCGGGT |
| | | GTTCGGCAAGCCCGACGGCAAGCCCGAGTTCGAGGAGGCCGACACCCCCGAGAAG |
| | | CTGCGGACCCTGCTGGCCGAGAAGCTGTCCTCCCGGCCCGAGGCCGTGCACGAGT |
| | | ACGTGACCCCCCTGTTCGTGTCCCGGGCCCCCAACCGGAAGATGTCCGGCGCCCA |
| | | CAAGGACACCCTGCGGTCCGCCAAGCGGTTCGTGAAGCACAACGAGAAGATCTCC |
| | | GTGAAGCGGGTGTGGCTGACCGAGATCAAGCTGGCCGACCTGGAGAACATGGTGA |
| | | ACTACAAGAACGGCCGGGAGATCGAGCTGTACGAGGCCCTGAAGGCCCGGCTGGA |
| | | GGCCTACGGCGGCAACGCCAAGCAGGCCTTCGACCCCAAGGACAACCCCTTCTAC |
| | | AAGAAGGGCGGCCAGCTGGTGAAGGCCGTGCGGGTGGAGAAGACCCAGGAGTCCG |
| | | GCGTGCTGCTGAACAAGAAGAACGCCTACACCATCGCCGACAACGGCGACATGGT |
| | | GCGGGTGGACGTGTTCTGCAAGGTGGACAAGAAGGGCAAGAACCAGTACTTCATC |
| | | GTGCCCATCTACGCCTGGCAGGTGGCCGAGAACATCCTGCCCGACATCGACTGCA |
| | | AGGGCTACCGGATCGACGACTCCTACACCTTCTGCTTCTCCCTGCACAAGTACGA |
| | | CCTGATCGCCTTCCAGAAGGACGAGAAGTCCAAGGTGGAGTTCGCCTACTACATC |
| | | AACTGCGACTCCTCCAACGGCCGGTTCTACCTGGCCTGGCACGACAAGGGCTCCA |
| | | AGGAGCAGCAGTTCCGGATCTCCACCCAGAACCTGGTGCTGATCCAGAAGTACCA |
| | | GGTGAACGAGCTGGGCAAGGAGATCCGGCCCTGCCGGCTGAAGAAGCGGCCCCCC |
| | | GTGCGGTCCGAGTCCGCCACCCCCGAGTCCGTGTCCGGCTGGCGGCTGTTCAAGA |
| | | AGATCTCCTAG |
| 653 | Open reading | atgGACGGCTCCGGCGGCGGCTCCCCCAAGAAGAAGCGGAAGGTGGGCGGCTCCG |
| | frame for | GCGGCGGCgccgccttcaagcccaaccccatcaactacatcctgggcctggacat |
| | Nme2Cas9 | cggcatcgcctccgtgggctgggccatggtggagatcgacgaggaggagaacccc |
| | encoded | atccggctgatcgacctgggcgtgcgggtgttcgagcgggccgaggtgcccaaga |
| | by mRNA N | ccggcgactccctggccatggcccggcggctggcccggtccgtgcggcggctgac |
| | | ccggcggcgggcccaccggctgctgcgggcccggcggctgctgaagcgggagggc |
| | | gtgctgcaggccgccgacttcgacgagaacggcctgatcaagtccctgcccaaca |
| | | ccccctggcagctgcgggccgccgccctggaccggaagctgacccccctggagtg |
| | | gtccgccgtgctgctgcacctgatcaagcaccggggctacctgtcccagcggaag |
| | | aacgagggcgagaccgccgacaaggagctgggcgccctgctgaagggcgtggcca |
| | | acaacgcccacgccctgcagaccggcgacttccggacccccgccgagctggccct |
| | | gaacaagttcgagaaggagtccggccacatccggaaccagcggggcgactactcc |
| | | cacaccttctcccggaaggacctgcaggccgagctgatcctgctgttcgagaagc |
| | | agaaggagttcggcaacccccacgtgtccggcggcctgaaggagggcatcgagac |
| | | cctgctgatgacccagcggcccgccctgtccggcgacgccgtgcagaagatgctg |
| | | ggccactgcaccttcgagcccgccgagcccaaggccgccaagaacacctacaccg |
| | | ccgagcggttcatctggctgaccaagctgaacaacctgcggatcctggagcaggg |
| | | ctccgagcggcccctgaccgacaccgagcgggccaccctgatggacgagccctac |
| | | cggaagtccaagctgacctacgcccaggcccggaagctgctgggcctggaggaca |
| | | ccgccttcttcaagggcctgcggtacggcaaggacaacgccgaggcctccaccct |
| | | gatggagatgaaggcctaccacgccatctcccgggccctggagaaggagggcctg |
| | | aaggacaagaagtcccccctgaacctgtcctccgagctgcaggacgagatcggca |
| | | ccgccttctccctgttcaagaccgacgaggacatcaccggccggctgaaggaccg |
| | | ggtgcagcccgagatcctggaggccctgctgaagcacatctccttcgacaagttc |
| | | gtgcagatctccctgaaggccctgcggcggatcgtgcccctgatggagcagggca |
| | | agcggtacgacgaggcctgcgccgagatctacggcgaccactacggcaagaagaa |
| | | caccgaggagaagatctacctgccccccatccccgccgacgagatccggaacccc |
| | | gtggtgctgcgggccctgtcccaggcccggaaggtgatcaacggcgtggtgcggc |
| | | ggtacggctcccccgcccggatccacatcgagaccgcccgggaggtgggcaagtc |
| | | cttcaaggaccggaaggagatcgagaagcggcaggaggagaaccggaaggaccgg |
| | | gagaaggccgccgccaagttccgggagtacttccccaacttcgtgggcgagccca |
| | | agtccaaggacatcctgaagctgcggctgtacgagcagcagcacggcaagtgcct |
| | | gtactccggcaaggagatcaacctggtgcggctgaacgagaagggctacgtggag |
| | | atcgaccacgccctgcccttctcccggacctgggacgactccttcaacaacaagg |
| | | tgctggtgctgggctccgagaaccagaacaagggcaaccagaccccctacgagta |
| | | cttcaacggcaaggacaactcccgggagtggcaggagttcaaggcccgggtggag |
| | | acctcccggttcccccggtccaagaagcagcggatcctgctgcagaagttcgacg |
| | | aggacggcttcaaggagtgcaacctgaacgacacccggtacgtgaaccggttcct |
| | | gtgccagttcgtggccgaccacatcctgctgaccggcaagggcaagcggcgggtg |
| | | ttcgcctccaacggccagatcaccaacctgctgcggggcttctggggcctgcgga |
| | | aggtgcgggccgagaacgaccggcaccacgccctggacgccgtggtggtggcctg |
| | | ctccaccgtggccatgcagcagaagatcacccggttcgtgcggtacaaggagatg |
| | | aacgccttcgacggcaagaccatcgacaaggagaccggcaaggtgctgcaccaga |
| | | agacccacttcccccagccctgggagttcttcgcccaggaggtgatgatccgggt |
| | | gttcggcaagcccgacggcaagcccgagttcgaggaggccgacacccccgagaag |
| | | ctgcggaccctgctggccgagaagctgtcctcccggcccgaggccgtgcacgagt |
| | | acgtgacccccctgttcgtgtcccgggcccccaaccggaagatgtccggcgccca |
| | | caaggacaccctgcggtccgccaagcggttcgtgaagcacaacgagaagatctcc |
| | | gtgaagcgggtgtggctgaccgagatcaagctggccgacctggagaacatggtga |
| | | actacaagaacggccgggagatcgagctgtacgaggccctgaaggcccggctgga |
| | | ggcctacggcggcaacgccaagcaggccttcgaccccaaggacaaccccttctac |
| | | aagaagggcggccagctggtgaaggccgtgcgggtggagaagacccaggagtccg |
| | | gcgtgctgctgaacaagaagaacgcctacaccatcgccgacaacggcgacatggt |
| | | gcgggtggacgtgttctgcaaggtggacaagaagggcaagaaccagtacttcatc |
| | | gtgcccatctacgcctggcaggtggccgagaacatcctgcccgacatcgactgca |
| | | agggctaccggatcgacgactcctacaccttctgcttctccctgcacaagtacga |
| | | cctgatcgccttccagaaggacgagaagtccaaggtggagttcgcctactacatc |
| | | aactgcgactcctccaacggccggttctacctggcctggcacgacaagggctcca |
| | | aggagcagcagttccggatctccacccagaacctggtgctgatccagaagtacca |
| | | ggtgaacgagctgggcaaggagatccggccctgccggctgaagaagcggcccccc |
| | | gtgcggTCCGGAAAGCGGACCGCCGACGGCTCCGGAGGAGGAAGCCCCGCCGCCA |
| | | AGAAGAAGAAGCTGGACtag |
| 654 | Open reading | atgGACGGCTCCGGCGGCGGCTCCCCCAAGAAGAAGCGGAAGGTGGAGGACAAGC |
| | frame for | GGCCCGCCGCCACCAAGAAGGCCGGCCAGGCCAAGAAGAAGAAGGGCGGCTCCGG |
| | Nme2Cas9 | CGGCGGCgccgccttcaagcccaaccccatcaactacatcctgggcctggacatc |
| | encoded | ggcatcgcctccgtgggctgggccatggtggagatcgacgaggaggagaacccca |
| | by mRNA O | tccggctgatcgacctgggcgtgcgggtgttcgagcgggccgaggtgcccaagac |
| | | cggcgactccctggccatggcccggcggctggcccggtccgtgcggcggctgacc |
| | | cggcggcgggcccaccggctgctgcgggcccggcggctgctgaagcgggagggcg |
| | | tgctgcaggccgccgacttcgacgagaacggcctgatcaagtccctgcccaacac |
| | | cccctggcagctgcgggccgccgccctggaccggaagctgacccccctggagtgg |
| | | tccgccgtgctgctgcacctgatcaagcaccggggctacctgtcccagcggaaga |
| | | acgagggcgagaccgccgacaaggagctgggcgccctgctgaagggcgtggccaa |
| | | caacgcccacgccctgcagaccggcgacttccggacccccgccgagctggccctg |
| | | aacaagttcgagaaggagtccggccacatccggaaccagcggggcgactactccc |
| | | acaccttctcccggaaggacctgcaggccgagctgatcctgctgttcgagaagca |
| | | gaaggagttcggcaacccccacgtgtccggcggcctgaaggagggcatcgagacc |
| | | ctgctgatgacccagcggcccgccctgtccggcgacgccgtgcagaagatgctgg |
| | | gccactgcaccttcgagcccgccgagcccaaggccgccaagaacacctacaccgc |
| | | cgagcggttcatctggctgaccaagctgaacaacctgcggatcctggagcagggc |
| | | tccgagcggcccctgaccgacaccgagcgggccaccctgatggacgagccctacc |
| | | ggaagtccaagctgacctacgcccaggcccggaagctgctgggcctggaggacac |
| | | cgccttcttcaagggcctgcggtacggcaaggacaacgccgaggcctccaccctg |
| | | atggagatgaaggcctaccacgccatctcccgggccctggagaaggagggcctga |
| | | aggacaagaagtcccccctgaacctgtcctccgagctgcaggacgagatcggcac |
| | | cgccttctccctgttcaagaccgacgaggacatcaccggccggctgaaggaccgg |
| | | gtgcagcccgagatcctggaggccctgctgaagcacatctccttcgacaagttcg |
| | | tgcagatctccctgaaggccctgcggcggatcgtgcccctgatggagcagggcaa |
| | | gcggtacgacgaggcctgcgccgagatctacggcgaccactacggcaagaagaac |
| | | accgaggagaagatctacctgccccccatccccgccgacgagatccggaaccccg |
| | | tggtgctgcgggccctgtcccaggcccggaaggtgatcaacggcgtggtgcggcg |
| | | gtacggctcccccgcccggatccacatcgagaccgcccgggaggtgggcaagtcc |
| | | ttcaaggaccggaaggagatcgagaagcggcaggaggagaaccggaaggaccggg |
| | | agaaggccgccgccaagttccgggagtacttccccaacttcgtgggcgagcccaa |
| | | gtccaaggacatcctgaagctgcggctgtacgagcagcagcacggcaagtgcctg |
| | | tactccggcaaggagatcaacctggtgcggctgaacgagaagggctacgtggaga |
| | | tcgaccacgccctgcccttctcccggacctgggacgactccttcaacaacaaggt |
| | | gctggtgctgggctccgagaaccagaacaagggcaaccagaccccctacgagtac |
| | | ttcaacggcaaggacaactcccgggagtggcaggagttcaaggcccgggtggaga |
| | | cctcccggttcccccggtccaagaagcagcggatcctgctgcagaagttcgacga |
| | | ggacggcttcaaggagtgcaacctgaacgacacccggtacgtgaaccggttcctg |
| | | tgccagttcgtggccgaccacatcctgctgaccggcaagggcaagcggcgggtgt |
| | | tcgcctccaacggccagatcaccaacctgctgcggggcttctggggcctgcggaa |
| | | ggtgcgggccgagaacgaccggcaccacgccctggacgccgtggtggtggcctgc |
| | | tccaccgtggccatgcagcagaagatcacccggttcgtgcggtacaaggagatga |
| | | acgccttcgacggcaagaccatcgacaaggagaccggcaaggtgctgcaccagaa |
| | | gacccacttcccccagccctgggagttcttcgcccaggaggtgatgatccgggtg |
| | | ttcggcaagcccgacggcaagcccgagttcgaggaggccgacacccccgagaagc |
| | | tgcggaccctgctggccgagaagctgtcctcccggcccgaggccgtgcacgagta |
| | | cgtgacccccctgttcgtgtcccgggcccccaaccggaagatgtccggcgcccac |
| | | aaggacaccctgcggtccgccaagcggttcgtgaagcacaacgagaagatctccg |
| | | tgaagcgggtgtggctgaccgagatcaagctggccgacctggagaacatggtgaa |
| | | ctacaagaacggccgggagatcgagctgtacgaggccctgaaggcccggctggag |
| | | gcctacggcggcaacgccaagcaggccttcgaccccaaggacaaccccttctaca |
| | | agaagggcggccagctggtgaaggccgtgcgggtggagaagacccaggagtccgg |
| | | cgtgctgctgaacaagaagaacgcctacaccatcgccgacaacggcgacatggtg |
| | | cgggtggacgtgttctgcaaggtggacaagaagggcaagaaccagtacttcatcg |
| | | tgcccatctacgcctggcaggtggccgagaacatcctgcccgacatcgactgcaa |
| | | gggctaccggatcgacgactcctacaccttctgcttctccctgcacaagtacgac |
| | | ctgatcgccttccagaaggacgagaagtccaaggtggagttcgcctactacatca |
| | | actgcgactcctccaacggccggttctacctggcctggcacgacaagggctccaa |
| | | ggagcagcagttccggatctccacccagaacctggtgctgatccagaagtaccag |
| | | gtgaacgagctgggcaaggagatccggccctgccggctgaagaagcggccccccg |
| | | tgcggtag |
| 655 | Open reading | atgGACGGCTCCGGCGGCGGCTCCCCCAAGAAGAAGCGGAAGGTGGAGGACAAGC |
| | frame for | GGCCCGCCGCCACCAAGAAGGCCGGCCAGGCCAAGAAGAAGAAGGGCGGCTCCGG |
| | Nme2Cas9 with | CGGCGGCGCCGCCTTCAAGCCCAACCCCATCAACTACATCCTGGGCCTGGACATC |
| | HiBiT tag | GGCATCGCCTCCGTGGGCTGGGCCATGGTGGAGATCGACGAGGAGGAGAACCCCA |
| | encoded by | TCCGGCTGATCGACCTGGGCGTGCGGGTGTTCGAGCGGGCCGAGGTGCCCAAGAC |
| | mRNA P | CGGCGACTCCCTGGCCATGGCCCGGCGGCTGGCCCGGTCCGTGCGGCGGCTGACC |
| | | CGGCGGCGGGCCCACCGGCTGCTGCGGGCCCGGCGGCTGCTGAAGCGGGAGGGCG |
| | | TGCTGCAGGCCGCCGACTTCGACGAGAACGGCCTGATCAAGTCCCTGCCCAACAC |
| | | CCCCTGGCAGCTGCGGGCCGCCGCCCTGGACCGGAAGCTGACCCCCCTGGAGTGG |
| | | TCCGCCGTGCTGCTGCACCTGATCAAGCACCGGGGCTACCTGTCCCAGCGGAAGA |
| | | ACGAGGGCGAGACCGCCGACAAGGAGCTGGGCGCCCTGCTGAAGGGCGTGGCCAA |
| | | CAACGCCCACGCCCTGCAGACCGGCGACTTCCGGACCCCCGCCGAGCTGGCCCTG |
| | | AACAAGTTCGAGAAGGAGTCCGGCCACATCCGGAACCAGCGGGGCGACTACTCCC |
| | | ACACCTTCTCCCGGAAGGACCTGCAGGCCGAGCTGATCCTGCTGTTCGAGAAGCA |
| | | GAAGGAGTTCGGCAACCCCCACGTGTCCGGCGGCCTGAAGGAGGGCATCGAGACC |
| | | CTGCTGATGACCCAGCGGCCCGCCCTGTCCGGCGACGCCGTGCAGAAGATGCTGG |
| | | GCCACTGCACCTTCGAGCCCGCCGAGCCCAAGGCCGCCAAGAACACCTACACCGC |
| | | CGAGCGGTTCATCTGGCTGACCAAGCTGAACAACCTGCGGATCCTGGAGCAGGGC |
| | | TCCGAGCGGCCCCTGACCGACACCGAGCGGGCCACCCTGATGGACGAGCCCTACC |
| | | GGAAGTCCAAGCTGACCTACGCCCAGGCCCGGAAGCTGCTGGGCCTGGAGGACAC |
| | | CGCCTTCTTCAAGGGCCTGCGGTACGGCAAGGACAACGCCGAGGCCTCCACCCTG |
| | | ATGGAGATGAAGGCCTACCACGCCATCTCCCGGGCCCTGGAGAAGGAGGGCCTGA |
| | | AGGACAAGAAGTCCCCCCTGAACCTGTCCTCCGAGCTGCAGGACGAGATCGGCAC |
| | | CGCCTTCTCCCTGTTCAAGACCGACGAGGACATCACCGGCCGGCTGAAGGACCGG |
| | | GTGCAGCCCGAGATCCTGGAGGCCCTGCTGAAGCACATCTCCTTCGACAAGTTCG |
| | | TGCAGATCTCCCTGAAGGCCCTGCGGCGGATCGTGCCCCTGATGGAGCAGGGCAA |
| | | GCGGTACGACGAGGCCTGCGCCGAGATCTACGGCGACCACTACGGCAAGAAGAAC |
| | | ACCGAGGAGAAGATCTACCTGCCCCCCATCCCCGCCGACGAGATCCGGAACCCCG |
| | | TGGTGCTGCGGGCCCTGTCCCAGGCCCGGAAGGTGATCAACGGCGTGGTGCGGCG |
| | | GTACGGCTCCCCCGCCCGGATCCACATCGAGACCGCCCGGGAGGTGGGCAAGTCC |
| | | TTCAAGGACCGGAAGGAGATCGAGAAGCGGCAGGAGGAGAACCGGAAGGACCGGG |
| | | AGAAGGCCGCCGCCAAGTTCCGGGAGTACTTCCCCAACTTCGTGGGCGAGCCCAA |
| | | GTCCAAGGACATCCTGAAGCTGCGGCTGTACGAGCAGCAGCACGGCAAGTGCCTG |
| | | TACTCCGGCAAGGAGATCAACCTGGTGCGGCTGAACGAGAAGGGCTACGTGGAGA |
| | | TCGACCACGCCCTGCCCTTCTCCCGGACCTGGGACGACTCCTTCAACAACAAGGT |
| | | GCTGGTGCTGGGCTCCGAGAACCAGAACAAGGGCAACCAGACCCCCTACGAGTAC |
| | | TTCAACGGCAAGGACAACTCCCGGGAGTGGCAGGAGTTCAAGGCCCGGGTGGAGA |
| | | CCTCCCGGTTCCCCCGGTCCAAGAAGCAGCGGATCCTGCTGCAGAAGTTCGACGA |
| | | GGACGGCTTCAAGGAGTGCAACCTGAACGACACCCGGTACGTGAACCGGTTCCTG |
| | | TGCCAGTTCGTGGCCGACCACATCCTGCTGACCGGCAAGGGCAAGCGGCGGGTGT |
| | | TCGCCTCCAACGGCCAGATCACCAACCTGCTGCGGGGCTTCTGGGGCCTGCGGAA |
| | | GGTGCGGGCCGAGAACGACCGGCACCACGCCCTGGACGCCGTGGTGGTGGCCTGC |
| | | TCCACCGTGGCCATGCAGCAGAAGATCACCCGGTTCGTGCGGTACAAGGAGATGA |
| | | ACGCCTTCGACGGCAAGACCATCGACAAGGAGACCGGCAAGGTGCTGCACCAGAA |
| | | GACCCACTTCCCCCAGCCCTGGGAGTTCTTCGCCCAGGAGGTGATGATCCGGGTG |
| | | TTCGGCAAGCCCGACGGCAAGCCCGAGTTCGAGGAGGCCGACACCCCCGAGAAGC |
| | | TGCGGACCCTGCTGGCCGAGAAGCTGTCCTCCCGGCCCGAGGCCGTGCACGAGTA |
| | | CGTGACCCCCCTGTTCGTGTCCCGGGCCCCCAACCGGAAGATGTCCGGCGCCCAC |
| | | AAGGACACCCTGCGGTCCGCCAAGCGGTTCGTGAAGCACAACGAGAAGATCTCCG |
| | | TGAAGCGGGTGTGGCTGACCGAGATCAAGCTGGCCGACCTGGAGAACATGGTGAA |
| | | CTACAAGAACGGCCGGGAGATCGAGCTGTACGAGGCCCTGAAGGCCCGGCTGGAG |
| | | GCCTACGGCGGCAACGCCAAGCAGGCCTTCGACCCCAAGGACAACCCCTTCTACA |
| | | AGAAGGGCGGCCAGCTGGTGAAGGCCGTGCGGGTGGAGAAGACCCAGGAGTCCGG |
| | | CGTGCTGCTGAACAAGAAGAACGCCTACACCATCGCCGACAACGGCGACATGGTG |
| | | CGGGTGGACGTGTTCTGCAAGGTGGACAAGAAGGGCAAGAACCAGTACTTCATCG |
| | | TGCCCATCTACGCCTGGCAGGTGGCCGAGAACATCCTGCCCGACATCGACTGCAA |
| | | GGGCTACCGGATCGACGACTCCTACACCTTCTGCTTCTCCCTGCACAAGTACGAC |
| | | CTGATCGCCTTCCAGAAGGACGAGAAGTCCAAGGTGGAGTTCGCCTACTACATCA |
| | | ACTGCGACTCCTCCAACGGCCGGTTCTACCTGGCCTGGCACGACAAGGGCTCCAA |
| | | GGAGCAGCAGTTCCGGATCTCCACCCAGAACCTGGTGCTGATCCAGAAGTACCAG |
| | | GTGAACGAGCTGGGCAAGGAGATCCGGCCCTGCCGGCTGAAGAAGCGGCCCCCCG |
| | | TGCGGTCCGAGTCCGCCACCCCCGAGTCCGTGTCCGGCTGGCGGCTGTTCAAGAA |
| | | GATCTCCTAG |
| 656 | Open reading | atgGACGGCTCCGGCGGCGGCTCCGAGGACAAGCGGCCCGCCGCCACCAAGAAGG |
| | frame for | CCGGCCAGGCCAAGAAGAAGAAGGGCGGCTCCGGCGGCGGCgccgccttcaagcc |
| | Nme2Cas9 | caaccccatcaactacatcctgggcctggacatcggcatcgcctccgtgggctgg |
| | encoded | gccatggtggagatcgacgaggaggagaaccccatccggctgatcgacctgggcg |
| | by mRNA Q | tgcgggtgttcgagcgggccgaggtgcccaagaccggcgactccctggccatggc |
| | | ccggcggctggcccggtccgtgcggcggctgacccggcggcgggcccaccggctg |
| | | ctgcgggcccggcggctgctgaagcgggagggcgtgctgcaggccgccgacttcg |
| | | acgagaacggcctgatcaagtccctgcccaacaccccctggcagctgcgggccgc |
| | | cgccctggaccggaagctgacccccctggagtggtccgccgtgctgctgcacctg |
| | | atcaagcaccggggctacctgtcccagcggaagaacgagggcgagaccgccgaca |
| | | aggagctgggcgccctgctgaagggcgtggccaacaacgcccacgccctgcagac |
| | | cggcgacttccggacccccgccgagctggccctgaacaagttcgagaaggagtcc |
| | | ggccacatccggaaccagcggggcgactactcccacaccttctcccggaaggacc |
| | | tgcaggccgagctgatcctgctgttcgagaagcagaaggagttcggcaaccccca |
| | | cgtgtccggcggcctgaaggagggcatcgagaccctgctgatgacccagcggccc |
| | | gccctgtccggcgacgccgtgcagaagatgctgggccactgcaccttcgagcccg |
| | | ccgagcccaaggccgccaagaacacctacaccgccgagcggttcatctggctgac |
| | | caagctgaacaacctgcggatcctggagcagggctccgagcggcccctgaccgac |
| | | accgagcgggccaccctgatggacgagccctaccggaagtccaagctgacctacg |
| | | cccaggcccggaagctgctgggcctggaggacaccgccttcttcaagggcctgcg |
| | | gtacggcaaggacaacgccgaggcctccaccctgatggagatgaaggcctaccac |
| | | gccatctcccgggccctggagaaggagggcctgaaggacaagaagtcccccctga |
| | | acctgtcctccgagctgcaggacgagatcggcaccgccttctccctgttcaagac |
| | | cgacgaggacatcaccggccggctgaaggaccgggtgcagcccgagatcctggag |
| | | gccctgctgaagcacatctccttcgacaagttcgtgcagatctccctgaaggccc |
| | | tgcggcggatcgtgcccctgatggagcagggcaagcggtacgacgaggcctgcgc |
| | | cgagatctacggcgaccactacggcaagaagaacaccgaggagaagatctacctg |
| | | ccccccatccccgccgacgagatccggaaccccgtggtgctgcgggccctgtccc |
| | | aggcccggaaggtgatcaacggcgtggtgcggcggtacggctcccccgcccggat |
| | | ccacatcgagaccgcccgggaggtgggcaagtccttcaaggaccggaaggagatc |
| | | gagaagcggcaggaggagaaccggaaggaccgggagaaggccgccgccaagttcc |
| | | gggagtacttccccaacttcgtgggcgagcccaagtccaaggacatcctgaagct |
| | | gcggctgtacgagcagcagcacggcaagtgcctgtactccggcaaggagatcaac |
| | | ctggtgcggctgaacgagaagggctacgtggagatcgaccacgccctgcccttct |
| | | cccggacctgggacgactccttcaacaacaaggtgctggtgctgggctccgagaa |
| | | ccagaacaagggcaaccagaccccctacgagtacttcaacggcaaggacaactcc |
| | | cgggagtggcaggagttcaaggcccgggtggagacctcccggttcccccggtcca |
| | | agaagcagcggatcctgctgcagaagttcgacgaggacggcttcaaggagtgcaa |
| | | cctgaacgacacccggtacgtgaaccggttcctgtgccagttcgtggccgaccac |
| | | atcctgctgaccggcaagggcaagcggcgggtgttcgcctccaacggccagatca |
| | | ccaacctgctgcggggcttctggggcctgcggaaggtgcgggccgagaacgaccg |
| | | gcaccacgccctggacgccgtggtggtggcctgctccaccgtggccatgcagcag |
| | | aagatcacccggttcgtgcggtacaaggagatgaacgccttcgacggcaagacca |
| | | tcgacaaggagaccggcaaggtgctgcaccagaagacccacttcccccagccctg |
| | | ggagttcttcgcccaggaggtgatgatccgggtgttcggcaagcccgacggcaag |
| | | cccgagttcgaggaggccgacacccccgagaagctgcggaccctgctggccgaga |
| | | agctgtcctcccggcccgaggccgtgcacgagtacgtgacccccctgttcgtgtc |
| | | ccgggcccccaaccggaagatgtccggcgcccacaaggacaccctgcggtccgcc |
| | | aagcggttcgtgaagcacaacgagaagatctccgtgaagcgggtgtggctgaccg |
| | | agatcaagctggccgacctggagaacatggtgaactacaagaacggccgggagat |
| | | cgagctgtacgaggccctgaaggcccggctggaggcctacggcggcaacgccaag |
| | | caggccttcgaccccaaggacaaccccttctacaagaagggcggccagctggtga |
| | | aggccgtgcgggtggagaagacccaggagtccggcgtgctgctgaacaagaagaa |
| | | cgcctacaccatcgccgacaacggcgacatggtgcgggtggacgtgttctgcaag |
| | | gtggacaagaagggcaagaaccagtacttcatcgtgcccatctacgcctggcagg |
| | | tggccgagaacatcctgcccgacatcgactgcaagggctaccggatcgacgactc |
| | | ctacaccttctgcttctccctgcacaagtacgacctgatcgccttccagaaggac |
| | | gagaagtccaaggtggagttcgcctactacatcaactgcgactcctccaacggcc |
| | | ggttctacctggcctggcacgacaagggctccaaggagcagcagttccggatctc |
| | | cacccagaacctggtgctgatccagaagtaccaggtgaacgagctgggcaaggag |
| | | atccggccctgccggctgaagaagcggccccccgtgcggtag |
| 657 | Open reading | ATGGACGGCTCCGGCGGCGGCTCCCCCAAGAAGAAGCGGAAGGTGGAGGACAAGC |
| | frame for | GGCCCGCCGCCACCAAGAAGGCCGGCCAGGCCAAGAAGAAGAAGGGCGGCTCCGG |
| | Nme2Cas9 base | CGGCGGCGAGGCCTCCCCCGCCTCCGGCCCCCGGCACCTGATGGACCCCCACATC |
| | editor encoded | TTCACCTCCAACTTCAACAACGGCATCGGCCGGCACAAGACCTACCTGTGCTACG |
| | by mRNA R | AGGTGGAGCGGCTGGACAACGGCACCTCCGTGAAGATGGACCAGCACCGGGGCTT |
| | | CCTGCACAACCAGGCCAAGAACCTGCTGTGCGGCTTCTACGGCCGGCACGCCGAG |
| | | CTGCGGTTCCTGGACCTGGTGCCCTCCCTGCAGCTGGACCCCGCCCAGATCTACC |
| | | GGGTGACCTGGTTCATCTCCTGGTCCCCCTGCTTCTCCTGGGGCTGCGCCGGCGA |
| | | GGTGCGGGCCTTCCTGCAGGAGAACACCCACGTGCGGCTGCGGATCTTCGCCGCC |
| | | CGGATCTACGACTACGACCCCCTGTACAAGGAGGCCCTGCAGATGCTGCGGGACG |
| | | CCGGCGCCCAGGTGTCCATCATGACCTACGACGAGTTCAAGCACTGCTGGGACAC |
| | | CTTCGTGGACCACCAGGGCTGCCCCTTCCAGCCCTGGGACGGCCTGGACGAGCAC |
| | | TCCCAGGCCCTGTCCGGCCGGCTGCGGGCCATCCTGCAGAACCAGGGCAACTCCG |
| | | GCTCCGAGACCCCCGGCACCTCCGAGTCCGCCACCCCCGAGTCCGCAGCGTTCAA |
| | | ACCAAATcccatcaactacatcctgggcctggccatcggcatcgcctccgtgggc |
| | | tgggccatggtggagatcgacgaggaggagaaccccatccggctgatcgacctgg |
| | | gcgtgcgggtgttcgagcgggccgaggtgcccaagaccggcgactccctggccat |
| | | ggcccggcggctggcccggtccgtgcggcggctgacccggcggcgggcccaccgg |
| | | ctgctgcgggcccggcggctgctgaagcgggagggcgtgctgcaggccgccgact |
| | | tcgacgagaacggcctgatcaagtccctgcccaacaccccctggcagctgcgggc |
| | | cgccgccctggaccggaagctgacccccctggagtggtccgccgtgctgctgcac |
| | | ctgatcaagcaccggggctacctgtcccagcggaagaacgagggcgagaccgccg |
| | | acaaggagctgggcgccctgctgaagggcgtggccaacaacgcccacgccctgca |
| | | gaccggcgacttccggacccccgccgagctggccctgaacaagttcgagaaggag |
| | | tccggccacatccggaaccagcggggcgactactcccacaccttctcccggaagg |
| | | acctgcaggccgagctgatcctgctgttcgagaagcagaaggagttcggcaaccc |
| | | ccacgtgtccggcggcctgaaggagggcatcgagaccctgctgatgacccagcgg |
| | | cccgccctgtccggcgacgccgtgcagaagatgctgggccactgcaccttcgagc |
| | | ccgccgagcccaaggccgccaagaacacctacaccgccgagcggttcatctggct |
| | | gaccaagctgaacaacctgcggatcctggagcagggctccgagcggcccctgacc |
| | | gacaccgagcgggccaccctgatggacgagccctaccggaagtccaagctgacct |
| | | acgcccaggcccggaagctgctgggcctggaggacaccgccttcttcaagggcct |
| | | gcggtacggcaaggacaacgccgaggcctccaccctgatggagatgaaggcctac |
| | | cacgccatctcccgggccctggagaaggagggcctgaaggacaagaagtcccccc |
| | | tgaacctgtcctccgagctgcaggacgagatcggcaccgccttctccctgttcaa |
| | | gaccgacgaggacatcaccggccggctgaaggaccgggtgcagcccgagatcctg |
| | | gaggccctgctgaagcacatctccttcgacaagttcgtgcagatctccctgaagg |
| | | ccctgcggcggatcgtgcccctgatggagcagggcaagcggtacgacgaggcctg |
| | | cgccgagatctacggcgaccactacggcaagaagaacaccgaggagaagatctac |
| | | ctgccccccatccccgccgacgagatccggaaccccgtggtgctgcgggccctgt |
| | | cccaggcccggaaggtgatcaacggcgtggtgcggcggtacggctcccccgcccg |
| | | gatccacatcgagaccgcccgggaggtgggcaagtccttcaaggaccggaaggag |
| | | atcgagaagcggcaggaggagaaccggaaggaccgggagaaggccgccgccaagt |
| | | tccgggagtacttccccaacttcgtgggcgagcccaagtccaaggacatcctgaa |
| | | gctgcggctgtacgagcagcagcacggcaagtgcctgtactccggcaaggagatc |
| | | aacctggtgcggctgaacgagaagggctacgtggagatcgaccacgccctgccct |
| | | tctcccggacctgggacgactccttcaacaacaaggtgctggtgctgggctccga |
| | | gaaccagaacaagggcaaccagaccccctacgagtacttcaacggcaaggacaac |
| | | tcccgggagtggcaggagttcaaggcccgggtggagacctcccggttcccccggt |
| | | ccaagaagcagcggatcctgctgcagaagttcgacgaggacggcttcaaggagtg |
| | | caacctgaacgacacccggtacgtgaaccgcttcctgtgccagttcgtggccgac |
| | | cacatcctgctgaccggcaagggcaagcggcgggtgttcgcctccaacggccaga |
| | | tcaccaacctgctgcggggcttctggggcctgcggaaggtgcgggccgagaacga |
| | | ccggcaccacgccctggacgccgtggtggtggcctgctccaccgtggccatgcag |
| | | cagaagatcacccggttcgtgcggtacaaggagatgaacgccttcgacggcaaga |
| | | ccatcgacaaggagaccggcaaggtgctgcaccagaagacccacttcccccagcc |
| | | ctgggagttcttcgcccaggaggtgatgatccgggtgttcggcaagcccgacggc |
| | | aagcccgagttcgaggaggccgacacccccgagaagctgcggaccctgctggccg |
| | | agaagctgtcctcccggcccgaggccgtgcacgagtacgtgacccccctgttcgt |
| | | gtcccgggcccccaaccggaagatgtccggcgcccacaaggacaccctgcggtcc |
| | | gccaagcggttcgtgaagcacaacgagaagatctccgtgaagcgggtgtggctga |
| | | ccgagatcaagctggccgacctggagaacatggtgaactacaagaacggccggga |
| | | gatcgagctgtacgaggccctgaaggcccggctggaggcctacggcggcaacgcc |
| | | aagcaggccttcgaccccaaggacaaccccttctacaagaagggcggccagctgg |
| | | tgaaggccgtgcgggtggagaagacccaggagtccggcgtgctgctgaacaagaa |
| | | gaacgcctacaccatcgccgacaacggcgacatggtgcgggtggacgtgttctgc |
| | | aaggtggacaagaagggcaagaaccagtacttcatcgtgcccatctacgcctggc |
| | | aggtggccgagaacatcctgcccgacatcgactgcaagggctaccggatcgacga |
| | | ctcctacaccttctgcttctccctgcacaagtacgacctgatcgccttccagaag |
| | | gacgagaagtccaaggtggagttcgcctactacatcaactgcgactcctccaacg |
| | | gccggttctacctggcctggcacgacaagggctccaaggagcagcagttccggat |
| | | ctccacccagaacctggtgctgatccagaagtaccaggtgaacgagctgggcaag |
| | | gagatccggccctgccggctgaagaagcggccccccgtgcggtccggaaagcgga |
| | | ccgccgacggctccgagttcgagtcccccaagaagaagcggaaggtggagtag |
| 658 | Open reading | ATGGACGGCTCCGGCGGCGGCTCCCCCAAGAAGAAGCGGAAGGTGGAGGACAAGC |
| | frame for | GGCCCGCCGCCACCAAGAAGGCCGGCCAGGCCAAGAAGAAGAAGGGCGGCTCCGG |
| | Nme2Cas9 base | CGGCGGCGAGGCCTCCCCCGCCTCCGGCCCCCGGCACCTGATGGACCCCCACATC |
| | editor encoded | TTCACCTCCAACTTCAACAACGGCATCGGCCGGCACAAGACCTACCTGTGCTACG |
| | by mRNA R | AGGTGGAGCGGCTGGACAACGGCACCTCCGTGAAGATGGACCAGCACCGGGGCTT |
| | | CCTGCACAACCAGGCCAAGAACCTGCTGTGCGGCTTCTACGGCCGGCACGCCGAG |
| | | CTGCGGTTCCTGGACCTGGTGCCCTCCCTGCAGCTGGACCCCGCCCAGATCTACC |
| | | GGGTGACCTGGTTCATCTCCTGGTCCCCCTGCTTCTCCTGGGGCTGCGCCGGCGA |
| | | GGTGCGGGCCTTCCTGCAGGAGAACACCCACGTGCGGCTGCGGATCTTCGCCGCC |
| | | CGGATCTACGACTACGACCCCCTGTACAAGGAGGCCCTGCAGATGCTGCGGGACG |
| | | CCGGCGCCCAGGTGTCCATCATGACCTACGACGAGTTCAAGCACTGCTGGGACAC |
| | | CTTCGTGGACCACCAGGGCTGCCCCTTCCAGCCCTGGGACGGCCTGGACGAGCAC |
| | | TCCCAGGCCCTGTCCGGCCGGCTGCGGGCCATCCTGCAGAACCAGGGCAACTCCG |
| | | GCTCCGAGACCCCCGGCACCTCCGAGTCCGCCACCCCCGAGTCCGCAGCGTTCAA |
| | | ACCAAATcccatcaactacatcctgggcctggccatcggcatcgcctccgtgggc |
| | | tgggccatggtggagatcgacgaggaggagaaccccatccggctgatcgacctgg |
| | | gcgtgcgggtgttcgagcgggccgaggtgcccaagaccggcgactccctggccat |
| | | ggcccggcggctggcccggtccgtgcggcggctgacccggcggcgggcccaccgg |
| | | ctgctgcgggcccggcggctgctgaagcgggagggcgtgctgcaggccgccgact |
| | | tcgacgagaacggcctgatcaagtccctgcccaacaccccctggcagctgcgggc |
| | | cgccgccctggaccggaagctgacccccctggagtggtccgccgtgctgctgcac |
| | | ctgatcaagcaccggggctacctgtcccagcggaagaacgagggcgagaccgccg |
| | | acaaggagctgggcgccctgctgaagggcgtggccaacaacgcccacgccctgca |
| | | gaccggcgacttccggacccccgccgagctggccctgaacaagttcgagaaggag |
| | | tccggccacatccggaaccagcggggcgactactcccacaccttctcccggaagg |
| | | acctgcaggccgagctgatcctgctgttcgagaagcagaaggagttcggcaaccc |
| | | ccacgtgtccggcggcctgaaggagggcatcgagaccctgctgatgacccagcgg |
| | | cccgccctgtccggcgacgccgtgcagaagatgctgggccactgcaccttcgagc |
| | | ccgccgagcccaaggccgccaagaacacctacaccgccgagcggttcatctggct |
| | | gaccaagctgaacaacctgcggatcctggagcagggctccgagcggcccctgacc |
| | | gacaccgagcgggccaccctgatggacgagccctaccggaagtccaagctgacct |
| | | acgcccaggcccggaagctgctgggcctggaggacaccgccttcttcaagggcct |
| | | gcggtacggcaaggacaacgccgaggcctccaccctgatggagatgaaggcctac |
| | | cacgccatctcccgggccctggagaaggagggcctgaaggacaagaagtcccccc |
| | | tgaacctgtcctccgagctgcaggacgagatcggcaccgccttctccctgttcaa |
| | | gaccgacgaggacatcaccggccggctgaaggaccgggtgcagcccgagatcctg |
| | | gaggccctgctgaagcacatctccttcgacaagttcgtgcagatctccctgaagg |
| | | ccctgcggcggatcgtgcccctgatggagcagggcaagcggtacgacgaggcctg |
| | | cgccgagatctacggcgaccactacggcaagaagaacaccgaggagaagatctac |
| | | ctgccccccatccccgccgacgagatccggaaccccgtggtgctgcgggccctgt |
| | | cccaggcccggaaggtgatcaacggcgtggtgcggcggtacggctcccccgcccg |
| | | gatccacatcgagaccgcccgggaggtgggcaagtccttcaaggaccggaaggag |
| | | atcgagaagcggcaggaggagaaccggaaggaccgggagaaggccgccgccaagt |
| | | tccgggagtacttccccaacttcgtgggcgagcccaagtccaaggacatcctgaa |
| | | gctgcggctgtacgagcagcagcacggcaagtgcctgtactccggcaaggagatc |
| | | aacctggtgcggctgaacgagaagggctacgtggagatcgaccacgccctgccct |
| | | tctcccggacctgggacgactccttcaacaacaaggtgctggtgctgggctccga |
| | | gaaccagaacaagggcaaccagaccccctacgagtacttcaacggcaaggacaac |
| | | tcccgggagtggcaggagttcaaggcccgggtggagacctcccggttcccccggt |
| | | ccaagaagcagcggatcctgctgcagaagttcgacgaggacggcttcaaggagtg |
| | | caacctgaacgacacccggtacgtgaaccgcttcctgtgccagttcgtggccgac |
| | | cacatcctgctgaccggcaagggcaagcggcgggtgttcgcctccaacggccaga |
| | | tcaccaacctgctgcggggcttctggggcctgcggaaggtgcgggccgagaacga |
| | | ccggcaccacgccctggacgccgtggtggtggcctgctccaccgtggccatgcag |
| | | cagaagatcacccggttcgtgcggtacaaggagatgaacgccttcgacggcaaga |
| | | ccatcgacaaggagaccggcaaggtgctgcaccagaagacccacttcccccagcc |
| | | ctgggagttcttcgcccaggaggtgatgatccgggtgttcggcaagcccgacggc |
| | | aagcccgagttcgaggaggccgacacccccgagaagctgcggaccctgctggccg |
| | | agaagctgtcctcccggcccgaggccgtgcacgagtacgtgacccccctgttcgt |
| | | gtcccgggcccccaaccggaagatgtccggcgcccacaaggacaccctgcggtcc |
| | | gccaagcggttcgtgaagcacaacgagaagatctccgtgaagcgggtgtggctga |
| | | ccgagatcaagctggccgacctggagaacatggtgaactacaagaacggccggga |
| | | gatcgagctgtacgaggccctgaaggcccggctggaggcctacggcggcaacgcc |
| | | aagcaggccttcgaccccaaggacaaccccttctacaagaagggcggccagctgg |
| | | tgaaggccgtgcgggtggagaagacccaggagtccggcgtgctgctgaacaagaa |
| | | gaacgcctacaccatcgccgacaacggcgacatggtgcgggtggacgtgttctgc |
| | | aaggtggacaagaagggcaagaaccagtacttcatcgtgcccatctacgcctggc |
| | | aggtggccgagaacatcctgcccgacatcgactgcaagggctaccggatcgacga |
| | | ctcctacaccttctgcttctccctgcacaagtacgacctgatcgccttccagaag |
| | | gacgagaagtccaaggtggagttcgcctactacatcaactgcgactcctccaacg |
| | | gccggttctacctggcctggcacgacaagggctccaaggagcagcagttccggat |
| | | ctccacccagaacctggtgctgatccagaagtaccaggtgaacgagctgggcaag |
| | | gagatccggccctgccggctgaagaagcggccccccgtgcggtag |
| 659 | Open reading | ATGGAGGCCTCCCCCGCCTCCGGCCCCCGGCACCTGATGGACCCCCACATCTTCA |
| | frame for | CCTCCAACTTCAACAACGGCATCGGCCGGCACAAGACCTACCTGTGCTACGAGGT |
| | Nme2Cas9 base | GGAGCGGCTGGACAACGGCACCTCCGTGAAGATGGACCAGCACCGGGGCTTCCTG |
| | editor encoded | CACAACCAGGCCAAGAACCTGCTGTGCGGCTTCTACGGCCGGCACGCCGAGCTGC |
| | by mRNA S | GGTTCCTGGACCTGGTGCCCTCCCTGCAGCTGGACCCCGCCCAGATCTACCGGGT |
| | | GACCTGGTTCATCTCCTGGTCCCCCTGCTTCTCCTGGGGCTGCGCCGGCGAGGTG |
| | | CGGGCCTTCCTGCAGGAGAACACCCACGTGCGGCTGCGGATCTTCGCCGCCCGGA |
| | | TCTACGACTACGACCCCCTGTACAAGGAGGCCCTGCAGATGCTGCGGGACGCCGG |
| | | CGCCCAGGTGTCCATCATGACCTACGACGAGTTCAAGCACTGCTGGGACACCTTC |
| | | GTGGACCACCAGGGCTGCCCCTTCCAGCCCTGGGACGGCCTGGACGAGCACTCCC |
| | | AGGCCCTGTCCGGCCGGCTGCGGGCCATCCTGCAGAACCAGGGCAACTCCGGCTC |
| | | CGAGACCCCCGGCACCTCCGAGTCCGCCACCCCCGAGTCCGCAGCGTTCAAACCA |
| | | AATcccatcaactacatcctgggcctggccatcggcatcgcctccgtgggctggg |
| | | ccatggtggagatcgacgaggaggagaaccccatccggctgatcgacctgggcgt |
| | | gcgggtgttcgagcgggccgaggtgcccaagaccggcgactccctggccatggcc |
| | | cggcggctggcccggtccgtgcggcggctgacccggcggcgggcccaccggctgc |
| | | tgcgggcccggcggctgctgaagcgggagggcgtgctgcaggccgccgacttcga |
| | | cgagaacggcctgatcaagtccctgcccaacaccccctggcagctgcgggccgcc |
| | | gccctggaccggaagctgacccccctggagtggtccgccgtgctgctgcacctga |
| | | tcaagcaccggggctacctgtcccagcggaagaacgagggcgagaccgccgacaa |
| | | ggagctgggcgccctgctgaagggcgtggccaacaacgcccacgccctgcagacc |
| | | ggcgacttccggacccccgccgagctggccctgaacaagttcgagaaggagtccg |
| | | gccacatccggaaccagcggggcgactactcccacaccttctcccggaaggacct |
| | | gcaggccgagctgatcctgctgttcgagaagcagaaggagttcggcaacccccac |
| | | gtgtccggcggcctgaaggagggcatcgagaccctgctgatgacccagcggcccg |
| | | ccctgtccggcgacgccgtgcagaagatgctgggccactgcaccttcgagcccgc |
| | | cgagcccaaggccgccaagaacacctacaccgccgagcggttcatctggctgacc |
| | | aagctgaacaacctgcggatcctggagcagggctccgagcggcccctgaccgaca |
| | | ccgagcgggccaccctgatggacgagccctaccggaagtccaagctgacctacgc |
| | | ccaggcccggaagctgctgggcctggaggacaccgccttcttcaagggcctgcgg |
| | | tacggcaaggacaacgccgaggcctccaccctgatggagatgaaggcctaccacg |
| | | ccatctcccgggccctggagaaggagggcctgaaggacaagaagtcccccctgaa |
| | | cctgtcctccgagctgcaggacgagatcggcaccgccttctccctgttcaagacc |
| | | gacgaggacatcaccggccggctgaaggaccgggtgcagcccgagatcctggagg |
| | | ccctgctgaagcacatctccttcgacaagttcgtgcagatctccctgaaggccct |
| | | gcggcggatcgtgcccctgatggagcagggcaagcggtacgacgaggcctgcgcc |
| | | gagatctacggcgaccactacggcaagaagaacaccgaggagaagatctacctgc |
| | | cccccatccccgccgacgagatccggaaccccgtggtgctgcgggccctgtccca |
| | | ggcccggaaggtgatcaacggcgtggtgcggcggtacggctcccccgcccggatc |
| | | cacatcgagaccgcccgggaggtgggcaagtccttcaaggaccggaaggagatcg |
| | | agaagcggcaggaggagaaccggaaggaccgggagaaggccgccgccaagttccg |
| | | ggagtacttccccaacttcgtgggcgagcccaagtccaaggacatcctgaagctg |
| | | cggctgtacgagcagcagcacggcaagtgcctgtactccggcaaggagatcaacc |
| | | tggtgcggctgaacgagaagggctacgtggagatcgaccacgccctgcccttctc |
| | | ccggacctgggacgactccttcaacaacaaggtgctggtgctgggctccgagaac |
| | | cagaacaagggcaaccagaccccctacgagtacttcaacggcaaggacaactccc |
| | | gggagtggcaggagttcaaggcccgggtggagacctcccggttcccccggtccaa |
| | | gaagcagcggatcctgctgcagaagttcgacgaggacggcttcaaggagtgcaac |
| | | ctgaacgacacccggtacgtgaaccgcttcctgtgccagttcgtggccgaccaca |
| | | tcctgctgaccggcaagggcaagcggcgggtgttcgcctccaacggccagatcac |
| | | caacctgctgcggggcttctggggcctgcggaaggtgcgggccgagaacgaccgg |
| | | caccacgccctggacgccgtggtggtggcctgctccaccgtggccatgcagcaga |
| | | agatcacccggttcgtgcggtacaaggagatgaacgccttcgacggcaagaccat |
| | | cgacaaggagaccggcaaggtgctgcaccagaagacccacttcccccagccctgg |
| | | gagttcttcgcccaggaggtgatgatccgggtgttcggcaagcccgacggcaagc |
| | | ccgagttcgaggaggccgacacccccgagaagctgcggaccctgctggccgagaa |
| | | gctgtcctcccggcccgaggccgtgcacgagtacgtgacccccctgttcgtgtcc |
| | | cgggcccccaaccggaagatgtccggcgcccacaaggacaccctgcggtccgcca |
| | | agcggttcgtgaagcacaacgagaagatctccgtgaagcgggtgtggctgaccga |
| | | gatcaagctggccgacctggagaacatggtgaactacaagaacggccgggagatc |
| | | gagctgtacgaggccctgaaggcccggctggaggcctacggcggcaacgccaagc |
| | | aggccttcgaccccaaggacaaccccttctacaagaagggcggccagctggtgaa |
| | | ggccgtgcgggtggagaagacccaggagtccggcgtgctgctgaacaagaagaac |
| | | gcctacaccatcgccgacaacggcgacatggtgcgggtggacgtgttctgcaagg |
| | | tggacaagaagggcaagaaccagtacttcatcgtgcccatctacgcctggcaggt |
| | | ggccgagaacatcctgcccgacatcgactgcaagggctaccggatcgacgactcc |
| | | tacaccttctgcttctccctgcacaagtacgacctgatcgccttccagaaggacg |
| | | agaagtccaaggtggagttcgcctactacatcaactgcgactcctccaacggccg |
| | | gttctacctggcctggcacgacaagggctccaaggagcagcagttccggatctcc |
| | | acccagaacctggtgctgatccagaagtaccaggtgaacgagctgggcaaggaga |
| | | tccggccctgccggctgaagaagcggccccccgtgcggtccggaaagcggaccgc |
| | | cgacggctccgagttcgagtcccccaagaagaagcggaaggtggagtag |
| 660 | Open reading | ATGaagCTGggcTCCatcGAGttcATCaagGTGaacAAGggcTCCggcTCCggcT |
| | frame for | CCGGCgccCCCgagTCCgccACCgagTCCggcGGCaccTCCaccGAGtccGAGgg |
| | Nme2Cas9 | cTCCgccGGCaccTCCaccGAGtccGAGggctccGCCggcTCCgccGGCtccacc |
| | encoded | TCCaccGAGgagGGCaccTCCaccGAGtccGAGggctccGCCggcACCtccACCg |
| | by mRNA U | agtccgagGGCtccGCCggcACCtccGAGtccgccACCgagTCCggcGGCaccTC |
| | | CaccGAGtccGAGggcTCCtccTCCaccggtgccgccttcaagcccaaccccatc |
| | | aactacatcctgggcctggacatcggcatcgcctccgtgggctgggccatggtgg |
| | | agatcgacgaggaggagaaccccatccggctgatcgacctgggcgtgcgggtgtt |
| | | cgagcgggccgaggtgcccaagaccggcgactccctggccatggcccggcggctg |
| | | gcccggtccgtgcggcggctgacccggcggcgggcccaccggctgctgcgggccc |
| | | ggcggctgctgaagcgggagggcgtgctgcaggccgccgacttcgacgagaacgg |
| | | cctgatcaagtccctgcccaacaccccctggcagctgcgggccgccgccctggac |
| | | cggaagctgacccccctggagtggtccgccgtgctgctgcacctgatcaagcacc |
| | | ggggctacctgtcccagcggaagaacgagggcgagaccgccgacaaggagctggg |
| | | cgccctgctgaagggcgtggccaacaacgcccacgccctgcagaccggcgacttc |
| | | cggacccccgccgagctggccctgaacaagttcgagaaggagtccggccacatcc |
| | | ggaaccagcggggcgactactcccacaccttctcccggaaggacctgcaggccga |
| | | gctgatcctgctgttcgagaagcagaaggagttcggcaacccccacgtgtccggc |
| | | ggcctgaaggagggcatcgagaccctgctgatgacccagcggcccgccctgtccg |
| | | gcgacgccgtgcagaagatgctgggccactgcaccttcgagcccgccgagcccaa |
| | | ggccgccaagaacacctacaccgccgagcggttcatctggctgaccaagctgaac |
| | | aacctgcggatcctggagcagggctccgagcggcccctgaccgacaccgagcggg |
| | | ccaccctgatggacgagccctaccggaagtccaagctgacctacgcccaggcccg |
| | | gaagctgctgggcctggaggacaccgccttcttcaagggcctgcggtacggcaag |
| | | gacaacgccgaggcctccaccctgatggagatgaaggcctaccacgccatctccc |
| | | gggccctggagaaggagggcctgaaggacaagaagtcccccctgaacctgtcctc |
| | | cgagctgcaggacgagatcggcaccgccttctccctgttcaagaccgacgaggac |
| | | atcaccggccggctgaaggaccgggtgcagcccgagatcctggaggccctgctga |
| | | agcacatctccttcgacaagttcgtgcagatctccctgaaggccctgcggcggat |
| | | cgtgcccctgatggagcagggcaagcggtacgacgaggcctgcgccgagatctac |
| | | ggcgaccactacggcaagaagaacaccgaggagaagatctacctgccccccatcc |
| | | ccgccgacgagatccggaaccccgtggtgctgcgggccctgtcccaggcccggaa |
| | | ggtgatcaacggcgtggtgcggcggtacggctcccccgcccggatccacatcgag |
| | | accgcccgggaggtgggcaagtccttcaaggaccggaaggagatcgagaagcggc |
| | | aggaggagaaccggaaggaccgggagaaggccgccgccaagttccgggagtactt |
| | | ccccaacttcgtgggcgagcccaagtccaaggacatcctgaagctgcggctgtac |
| | | gagcagcagcacggcaagtgcctgtactccggcaaggagatcaacctggtgcggc |
| | | tgaacgagaagggctacgtggagatcgaccacgccctgcccttctcccggacctg |
| | | ggacgactccttcaacaacaaggtgctggtgctgggctccgagaaccagaacaag |
| | | ggcaaccagaccccctacgagtacttcaacggcaaggacaactcccgggagtggc |
| | | aggagttcaaggcccgggtggagacctcccggttcccccggtccaagaagcagcg |
| | | gatcctgctgcagaagttcgacgaggacggcttcaaggagtgcaacctgaacgac |
| | | acccggtacgtgaaccgcttcctgtgccagttcgtggccgaccacatcctgctga |
| | | ccggcaagggcaagcggcgggtgttcgcctccaacggccagatcaccaacctgct |
| | | gcggggcttctggggcctgcggaaggtgcgggccgagaacgaccggcaccacgcc |
| | | ctggacgccgtggtggtggcctgctccaccgtggccatgcagcagaagatcaccc |
| | | ggttcgtgcggtacaaggagatgaacgccttcgacggcaagaccatcgacaagga |
| | | gaccggcaaggtgctgcaccagaagacccacttcccccagccctgggagttcttc |
| | | gcccaggaggtgatgatccgggtgttcggcaagcccgacggcaagcccgagttcg |
| | | aggaggccgacacccccgagaagctgcggaccctgctggccgagaagctgtcctc |
| | | ccggcccgaggccgtgcacgagtacgtgacccccctgttcgtgtcccgggccccc |
| | | aaccggaagatgtccggcgcccacaaggacaccctgcggtccgccaagcggttcg |
| | | tgaagcacaacgagaagatctccgtgaagcgggtgtggctgaccgagatcaagct |
| | | ggccgacctggagaacatggtgaactacaagaacggccgggagatcgagctgtac |
| | | gaggccctgaaggcccggctggaggcctacggcggcaacgccaagcaggccttcg |
| | | accccaaggacaaccccttctacaagaagggcggccagctggtgaaggccgtgcg |
| | | ggtggagaagacccaggagtccggcgtgctgctgaacaagaagaacgcctacacc |
| | | atcgccgacaacggcgacatggtgcgggtggacgtgttctgcaaggtggacaaga |
| | | agggcaagaaccagtacttcatcgtgcccatctacgcctggcaggtggccgagaa |
| | | catcctgcccgacatcgactgcaagggctaccggatcgacgactcctacaccttc |
| | | tgcttctccctgcacaagtacgacctgatcgccttccagaaggacgagaagtcca |
| | | aggtggagttcgcctactacatcaactgcgactcctccaacggccggttctacct |
| | | ggcctggcacgacaagggctccaaggagcagcagttccggatctccacccagaac |
| | | ctggtgctgatccagaagtaccaggtgaacgagctgggcaaggagatccggccct |
| | | gccggctgaagaagcggccccccgtgcggtccggaaagcggaccgccgacggctc |
| | | cgagttcgagtcccccaagaagaagcggaaggtggagtga |
| 661 | ORF encoding Sp. | ATGGACAAGAAGTACAGCATCGGACTGGACATCGGAACAAACAGCGTCGGATGGG |
| | Cas9 | CAGTCATCACAGACGAATACAAGGTCCCGAGCAAGAAGTTCAAGGTCCTGGGAAA |
| | | CACAGACAGACACAGCATCAAGAAGAACCTGATCGGAGCACTGCTGTTCGACAGC |
| | | GGAGAAACAGCAGAAGCAACAAGACTGAAGAGAACAGCAAGAAGAAGATACACAA |
| | | GAAGAAAGAACAGAATCTGCTACCTGCAGGAAATCTTCAGCAACGAAATGGCAAA |
| | | GGTCGACGACAGCTTCTTCCACAGACTGGAAGAAAGCTTCCTGGTCGAAGAAGAC |
| | | AAGAAGCACGAAAGACACCCGATCTTCGGAAACATCGTCGACGAAGTCGCATACC |
| | | ACGAAAAGTACCCGACAATCTACCACCTGAGAAAGAAGCTGGTCGACAGCACAGA |
| | | CAAGGCAGACCTGAGACTGATCTACCTGGCACTGGCACACATGATCAAGTTCAGA |
| | | GGACACTTCCTGATCGAAGGAGACCTGAACCCGGACAACAGCGACGTCGACAAGC |
| | | TGTTCATCCAGCTGGTCCAGACATACAACCAGCTGTTCGAAGAAAACCCGATCAA |
| | | CGCAAGCGGAGTCGACGCAAAGGCAATCCTGAGCGCAAGACTGAGCAAGAGCAGA |
| | | AGACTGGAAAACCTGATCGCACAGCTGCCGGGAGAAAAGAAGAACGGACTGTTCG |
| | | GAAACCTGATCGCACTGAGCCTGGGACTGACACCGAACTTCAAGAGCAACTTCGA |
| | | CCTGGCAGAAGACGCAAAGCTGCAGCTGAGCAAGGACACATACGACGACGACCTG |
| | | GACAACCTGCTGGCACAGATCGGAGACCAGTACGCAGACCTGTTCCTGGCAGCAA |
| | | AGAACCTGAGCGACGCAATCCTGCTGAGCGACATCCTGAGAGTCAACACAGAAAT |
| | | CACAAAGGCACCGCTGAGCGCAAGCATGATCAAGAGATACGACGAACACCACCAG |
| | | GACCTGACACTGCTGAAGGCACTGGTCAGACAGCAGCTGCCGGAAAAGTACAAGG |
| | | AAATCTTCTTCGACCAGAGCAAGAACGGATACGCAGGATACATCGACGGAGGAGC |
| | | AAGCCAGGAAGAATTCTACAAGTTCATCAAGCCGATCCTGGAAAAGATGGACGGA |
| | | ACAGAAGAACTGCTGGTCAAGCTGAACAGAGAAGACCTGCTGAGAAAGCAGAGAA |
| | | CATTCGACAACGGAAGCATCCCGCACCAGATCCACCTGGGAGAACTGCACGCAAT |
| | | CCTGAGAAGACAGGAAGACTTCTACCCGTTCCTGAAGGACAACAGAGAAAAGATC |
| | | GAAAAGATCCTGACATTCAGAATCCCGTACTACGTCGGACCGCTGGCAAGAGGAA |
| | | ACAGCAGATTCGCATGGATGACAAGAAAGAGCGAAGAAACAATCACACCGTGGAA |
| | | CTTCGAAGAAGTCGTCGACAAGGGAGCAAGCGCACAGAGCTTCATCGAAAGAATG |
| | | ACAAACTTCGACAAGAACCTGCCGAACGAAAAGGTCCTGCCGAAGCACAGCCTGC |
| | | TGTACGAATACTTCACAGTCTACAACGAACTGACAAAGGTCAAGTACGTCACAGA |
| | | AGGAATGAGAAAGCCGGCATTCCTGAGCGGAGAACAGAAGAAGGCAATCGTCGAC |
| | | CTGCTGTTCAAGACAAACAGAAAGGTCACAGTCAAGCAGCTGAAGGAAGACTACT |
| | | TCAAGAAGATCGAATGCTTCGACAGCGTCGAAATCAGCGGAGTCGAAGACAGATT |
| | | CAACGCAAGCCTGGGAACATACCACGACCTGCTGAAGATCATCAAGGACAAGGAC |
| | | TTCCTGGACAACGAAGAAAACGAAGACATCCTGGAAGACATCGTCCTGACACTGA |
| | | CACTGTTCGAAGACAGAGAAATGATCGAAGAAAGACTGAAGACATACGCACACCT |
| | | GTTCGACGACAAGGTCATGAAGCAGCTGAAGAGAAGAAGATACACAGGATGGGGA |
| | | AGACTGAGCAGAAAGCTGATCAACGGAATCAGAGACAAGCAGAGCGGAAAGACAA |
| | | TCCTGGACTTCCTGAAGAGCGACGGATTCGCAAACAGAAACTTCATGCAGCTGAT |
| | | CCACGACGACAGCCTGACATTCAAGGAAGACATCCAGAAGGCACAGGTCAGCGGA |
| | | CAGGGAGACAGCCTGCACGAACACATCGCAAACCTGGCAGGAAGCCCGGCAATCA |
| | | AGAAGGGAATCCTGCAGACAGTCAAGGTCGTCGACGAACTGGTCAAGGTCATGGG |
| | | AAGACACAAGCCGGAAAACATCGTCATCGAAATGGCAAGAGAAAACCAGACAACA |
| | | CAGAAGGGACAGAAGAACAGCAGAGAAAGAATGAAGAGAATCGAAGAAGGAATCA |
| | | AGGAACTGGGAAGCCAGATCCTGAAGGAACACCCGGTCGAAAACACACAGCTGCA |
| | | GAACGAAAAGCTGTACCTGTACTACCTGCAGAACGGAAGAGACATGTACGTCGAC |
| | | CAGGAACTGGACATCAACAGACTGAGCGACTACGACGTCGACCACATCGTCCCGC |
| | | AGAGCTTCCTGAAGGACGACAGCATCGACAACAAGGTCCTGACAAGAAGCGACAA |
| | | GAACAGAGGAAAGAGCGACAACGTCCCGAGCGAAGAAGTCGTCAAGAAGATGAAG |
| | | AACTACTGGAGACAGCTGCTGAACGCAAAGCTGATCACACAGAGAAAGTTCGACA |
| | | ACCTGACAAAGGCAGAGAGAGGAGGACTGAGCGAACTGGACAAGGCAGGATTCAT |
| | | CAAGAGACAGCTGGTCGAAACAAGACAGATCACAAAGCACGTCGCACAGATCCTG |
| | | GACAGCAGAATGAACACAAAGTACGACGAAAACGACAAGCTGATCAGAGAAGTCA |
| | | AGGTCATCACACTGAAGAGCAAGCTGGTCAGCGACTTCAGAAAGGACTTCCAGTT |
| | | CTACAAGGTCAGAGAAATCAACAACTACCACCACGCACACGACGCATACCTGAAC |
| | | GCAGTCGTCGGAACAGCACTGATCAAGAAGTACCCGAAGCTGGAAAGCGAATTCG |
| | | TCTACGGAGACTACAAGGTCTACGACGTCAGAAAGATGATCGCAAAGAGCGAACA |
| | | GGAAATCGGAAAGGCAACAGCAAAGTACTTCTTCTACAGCAACATCATGAACTTC |
| | | TTCAAGACAGAAATCACACTGGCAAACGGAGAAATCAGAAAGAGACCGCTGATCG |
| | | AAACAAACGGAGAAACAGGAGAAATCGTCTGGGACAAGGGAAGAGACTTCGCAAC |
| | | AGTCAGAAAGGTCCTGAGCATGCCGCAGGTCAACATCGTCAAGAAGACAGAAGTC |
| | | CAGACAGGAGGATTCAGCAAGGAAAGCATCCTGCCGAAGAGAAACAGCGACAAGC |
| | | TGATCGCAAGAAAGAAGGACTGGGACCCGAAGAAGTACGGAGGATTCGACAGCCC |
| | | GACAGTCGCATACAGCGTCCTGGTCGTCGCAAAGGTCGAAAAGGGAAAGAGCAAG |
| | | AAGCTGAAGAGCGTCAAGGAACTGCTGGGAATCACAATCATGGAAAGAAGCAGCT |
| | | TCGAAAAGAACCCGATCGACTTCCTGGAAGCAAAGGGATACAAGGAAGTCAAGAA |
| | | GGACCTGATCATCAAGCTGCCGAAGTACAGCCTGTTCGAACTGGAAAACGGAAGA |
| | | AAGAGAATGCTGGCAAGCGCAGGAGAACTGCAGAAGGGAAACGAACTGGCACTGC |
| | | CGAGCAAGTACGTCAACTTCCTGTACCTGGCAAGCCACTACGAAAAGCTGAAGGG |
| | | AAGCCCGGAAGACAACGAACAGAAGCAGCTGTTCGTCGAACAGCACAAGCACTAC |
| | | CTGGACGAAATCATCGAACAGATCAGCGAATTCAGCAAGAGAGTCATCCTGGCAG |
| | | ACGCAAACCTGGACAAGGTCCTGAGCGCATACAACAAGCACAGAGACAAGCCGAT |
| | | CAGAGAACAGGCAGAAAACATCATCCACCTGTTCACACTGACAAACCTGGGAGCA |
| | | CCGGCAGCATTCAAGTACTTCGACACAACAATCGACAGAAAGAGATACACAAGCA |
| | | CAAAGGAAGTCCTGGACGCAACACTGATCCACCAGAGCATCACAGGACTGTACGA |
| | | AACAAGAATCGACCTGAGCCAGCTGGGAGGAGACGGAGGAGGAAGCCCGAAGAAG |
| | | AAGAGAAAGGTCTAG |
| 662 | ORF encoding Sp. | ATGGACAAGAAGTACTCCATCGGCCTGGACATCGGCACCAACTCCGTGGGCTGGG |
| | Cas9 | CCGTGATCACCGACGAGTACAAGGTGCCCTCCAAGAAGTTCAAGGTGCTGGGCAA |
| | | CACCGACCGGCACTCCATCAAGAAGAACCTGATCGGCGCCCTGCTGTTCGACTCC |
| | | GGCGAGACCGCCGAGGCCACCCGGCTGAAGCGGACCGCCCGGCGGCGGTACACCC |
| | | GGCGGAAGAACCGGATCTGCTACCTGCAGGAGATCTTCTCCAACGAGATGGCCAA |
| | | GGTGGACGACTCCTTCTTCCACCGGCTGGAGGAGTCCTTCCTGGTGGAGGAGGAC |
| | | AAGAAGCACGAGCGGCACCCCATCTTCGGCAACATCGTGGACGAGGTGGCCTACC |
| | | ACGAGAAGTACCCCACCATCTACCACCTGCGGAAGAAGCTGGTGGACTCCACCGA |
| | | CAAGGCCGACCTGCGGCTGATCTACCTGGCCCTGGCCCACATGATCAAGTTCCGG |
| | | GGCCACTTCCTGATCGAGGGCGACCTGAACCCCGACAACTCCGACGTGGACAAGC |
| | | TGTTCATCCAGCTGGTGCAGACCTACAACCAGCTGTTCGAGGAGAACCCCATCAA |
| | | CGCCTCCGGCGTGGACGCCAAGGCCATCCTGTCCGCCCGGCTGTCCAAGTCCCGG |
| | | CGGCTGGAGAACCTGATCGCCCAGCTGCCCGGCGAGAAGAAGAACGGCCTGTTCG |
| | | GCAACCTGATCGCCCTGTCCCTGGGCCTGACCCCCAACTTCAAGTCCAACTTCGA |
| | | CCTGGCCGAGGACGCCAAGCTGCAGCTGTCCAAGGACACCTACGACGACGACCTG |
| | | GACAACCTGCTGGCCCAGATCGGCGACCAGTACGCCGACCTGTTCCTGGCCGCCA |
| | | AGAACCTGTCCGACGCCATCCTGCTGTCCGACATCCTGCGGGTGAACACCGAGAT |
| | | CACCAAGGCCCCCCTGTCCGCCTCCATGATCAAGCGGTACGACGAGCACCACCAG |
| | | GACCTGACCCTGCTGAAGGCCCTGGTGCGGCAGCAGCTGCCCGAGAAGTACAAGG |
| | | AGATCTTCTTCGACCAGTCCAAGAACGGCTACGCCGGCTACATCGACGGCGGCGC |
| | | CTCCCAGGAGGAGTTCTACAAGTTCATCAAGCCCATCCTGGAGAAGATGGACGGC |
| | | ACCGAGGAGCTGCTGGTGAAGCTGAACCGGGAGGACCTGCTGCGGAAGCAGCGGA |
| | | CCTTCGACAACGGCTCCATCCCCCACCAGATCCACCTGGGCGAGCTGCACGCCAT |
| | | CCTGCGGCGGCAGGAGGACTTCTACCCCTTCCTGAAGGACAACCGGGAGAAGATC |
| | | GAGAAGATCCTGACCTTCCGGATCCCCTACTACGTGGGCCCCCTGGCCCGGGGCA |
| | | ACTCCCGGTTCGCCTGGATGACCCGGAAGTCCGAGGAGACCATCACCCCCTGGAA |
| | | CTTCGAGGAGGTGGTGGACAAGGGCGCCTCCGCCCAGTCCTTCATCGAGCGGATG |
| | | ACCAACTTCGACAAGAACCTGCCCAACGAGAAGGTGCTGCCCAAGCACTCCCTGC |
| | | TGTACGAGTACTTCACCGTGTACAACGAGCTGACCAAGGTGAAGTACGTGACCGA |
| | | GGGCATGCGGAAGCCCGCCTTCCTGTCCGGCGAGCAGAAGAAGGCCATCGTGGAC |
| | | CTGCTGTTCAAGACCAACCGGAAGGTGACCGTGAAGCAGCTGAAGGAGGACTACT |
| | | TCAAGAAGATCGAGTGCTTCGACTCCGTGGAGATCTCCGGCGTGGAGGACCGGTT |
| | | CAACGCCTCCCTGGGCACCTACCACGACCTGCTGAAGATCATCAAGGACAAGGAC |
| | | TTCCTGGACAACGAGGAGAACGAGGACATCCTGGAGGACATCGTGCTGACCCTGA |
| | | CCCTGTTCGAGGACCGGGAGATGATCGAGGAGCGGCTGAAGACCTACGCCCACCT |
| | | GTTCGACGACAAGGTGATGAAGCAGCTGAAGCGGCGGCGGTACACCGGCTGGGGC |
| | | CGGCTGTCCCGGAAGCTGATCAACGGCATCCGGGACAAGCAGTCCGGCAAGACCA |
| | | TCCTGGACTTCCTGAAGTCCGACGGCTTCGCCAACCGGAACTTCATGCAGCTGAT |
| | | CCACGACGACTCCCTGACCTTCAAGGAGGACATCCAGAAGGCCCAGGTGTCCGGC |
| | | CAGGGCGACTCCCTGCACGAGCACATCGCCAACCTGGCCGGCTCCCCCGCCATCA |
| | | AGAAGGGCATCCTGCAGACCGTGAAGGTGGTGGACGAGCTGGTGAAGGTGATGGG |
| | | CCGGCACAAGCCCGAGAACATCGTGATCGAGATGGCCCGGGAGAACCAGACCACC |
| | | CAGAAGGGCCAGAAGAACTCCCGGGAGCGGATGAAGCGGATCGAGGAGGGCATCA |
| | | AGGAGCTGGGCTCCCAGATCCTGAAGGAGCACCCCGTGGAGAACACCCAGCTGCA |
| | | GAACGAGAAGCTGTACCTGTACTACCTGCAGAACGGCCGGGACATGTACGTGGAC |
| | | CAGGAGCTGGACATCAACCGGCTGTCCGACTACGACGTGGACCACATCGTGCCCC |
| | | AGTCCTTCCTGAAGGACGACTCCATCGACAACAAGGTGCTGACCCGGTCCGACAA |
| | | GAACCGGGGCAAGTCCGACAACGTGCCCTCCGAGGAGGTGGTGAAGAAGATGAAG |
| | | AACTACTGGCGGCAGCTGCTGAACGCCAAGCTGATCACCCAGCGGAAGTTCGACA |
| | | ACCTGACCAAGGCCGAGCGGGGCGGCCTGTCCGAGCTGGACAAGGCCGGCTTCAT |
| | | CAAGCGGCAGCTGGTGGAGACCCGGCAGATCACCAAGCACGTGGCCCAGATCCTG |
| | | GACTCCCGGATGAACACCAAGTACGACGAGAACGACAAGCTGATCCGGGAGGTGA |
| | | AGGTGATCACCCTGAAGTCCAAGCTGGTGTCCGACTTCCGGAAGGACTTCCAGTT |
| | | CTACAAGGTGCGGGAGATCAACAACTACCACCACGCCCACGACGCCTACCTGAAC |
| | | GCCGTGGTGGGCACCGCCCTGATCAAGAAGTACCCCAAGCTGGAGTCCGAGTTCG |
| | | TGTACGGCGACTACAAGGTGTACGACGTGCGGAAGATGATCGCCAAGTCCGAGCA |
| | | GGAGATCGGCAAGGCCACCGCCAAGTACTTCTTCTACTCCAACATCATGAACTTC |
| | | TTCAAGACCGAGATCACCCTGGCCAACGGCGAGATCCGGAAGCGGCCCCTGATCG |
| | | AGACCAACGGCGAGACCGGCGAGATCGTGTGGGACAAGGGCCGGGACTTCGCCAC |
| | | CGTGCGGAAGGTGCTGTCCATGCCCCAGGTGAACATCGTGAAGAAGACCGAGGTG |
| | | CAGACCGGCGGCTTCTCCAAGGAGTCCATCCTGCCCAAGCGGAACTCCGACAAGC |
| | | TGATCGCCCGGAAGAAGGACTGGGACCCCAAGAAGTACGGCGGCTTCGACTCCCC |
| | | CACCGTGGCCTACTCCGTGCTGGTGGTGGCCAAGGTGGAGAAGGGCAAGTCCAAG |
| | | AAGCTGAAGTCCGTGAAGGAGCTGCTGGGCATCACCATCATGGAGCGGTCCTCCT |
| | | TCGAGAAGAACCCCATCGACTTCCTGGAGGCCAAGGGCTACAAGGAGGTGAAGAA |
| | | GGACCTGATCATCAAGCTGCCCAAGTACTCCCTGTTCGAGCTGGAGAACGGCCGG |
| | | AAGCGGATGCTGGCCTCCGCCGGCGAGCTGCAGAAGGGCAACGAGCTGGCCCTGC |
| | | CCTCCAAGTACGTGAACTTCCTGTACCTGGCCTCCCACTACGAGAAGCTGAAGGG |
| | | CTCCCCCGAGGACAACGAGCAGAAGCAGCTGTTCGTGGAGCAGCACAAGCACTAC |
| | | CTGGACGAGATCATCGAGCAGATCTCCGAGTTCTCCAAGCGGGTGATCCTGGCCG |
| | | ACGCCAACCTGGACAAGGTGCTGTCCGCCTACAACAAGCACCGGGACAAGCCCAT |
| | | CCGGGAGCAGGCCGAGAACATCATCCACCTGTTCACCCTGACCAACCTGGGCGCC |
| | | CCCGCCGCCTTCAAGTACTTCGACACCACCATCGACCGGAAGCGGTACACCTCCA |
| | | CCAAGGAGGTGCTGGACGCCACCCTGATCCACCAGTCCATCACCGGCCTGTACGA |
| | | GACCCGGATCGACCTGTCCCAGCTGGGCGGCGACGGCGGCGGCTCCCCCAAGAAG |
| | | AAGCGGAAGGTGTGA |
| 663 | ORF encoding Sp. | AUGGACAAGAAGUACAGCAUCGGCCUGGACAUCGGCACGAACAGCGUUGGCUGGG |
| | Cas9 | CUGUGAUCACGGACGAGUACAAGGUUCCCUCAAAGAAGUUCAAGGUGCUGGGCAA |
| | | CACGGACCGGCACAGCAUCAAGAAGAAUCUCAUCGGUGCACUGCUGUUCGACAGC |
| | | GGUGAGACGGCCGAAGCCACGCGGCUGAAGCGGACGGCCCGCCGGCGGUACACGC |
| | | GGCGGAAGAACCGGAUCUGCUACCUGCAGGAGAUCUUCAGCAACGAGAUGGCCAA |
| | | GGUGGACGACAGCUUCUUCCACCGGCUGGAGGAGAGCUUCCUGGUGGAGGAGGAC |
| | | AAGAAGCACGAGCGGCACCCCAUCUUCGGCAACAUCGUGGACGAAGUCGCCUACC |
| | | ACGAGAAGUACCCCACCAUCUACCACCUGCGGAAGAAGCUGGUGGACUCGACUGA |
| | | CAAGGCCGACCUGCGGCUGAUCUACCUGGCACUGGCCCACAUGAUAAAGUUCCGG |
| | | GGCCACUUCCUGAUCGAGGGCGACCUGAACCCUGACAACAGCGACGUGGACAAGC |
| | | UGUUCAUCCAGCUGGUGCAGACCUACAACCAGCUGUUCGAGGAGAACCCCAUCAA |
| | | CGCCAGCGGCGUGGACGCCAAGGCCAUCCUCAGCGCCCGCCUCAGCAAGAGCCGG |
| | | CGGCUGGAGAAUCUCAUCGCCCAGCUUCCAGGUGAGAAGAAGAAUGGGCUGUUCG |
| | | GCAAUCUCAUCGCACUCAGCCUGGGCCUGACUCCCAACUUCAAGAGCAACUUCGA |
| | | CCUGGCCGAGGACGCCAAGCUGCAGCUCAGCAAGGACACCUACGACGACGACCUG |
| | | GACAAUCUCCUGGCCCAGAUCGGCGACCAGUACGCCGACCUGUUCCUGGCUGCCA |
| | | AGAAUCUCAGCGACGCCAUCCUGCUCAGCGACAUCCUGCGGGUGAACACAGAGAU |
| | | CACGAAGGCCCCCCUCAGCGCCAGCAUGAUAAAGCGGUACGACGAGCACCACCAG |
| | | GACCUGACGCUGCUGAAGGCACUGGUGCGGCAGCAGCUUCCAGAGAAGUACAAGG |
| | | AGAUCUUCUUCGACCAGAGCAAGAAUGGGUACGCCGGGUACAUCGACGGUGGUGC |
| | | CAGCCAGGAGGAGUUCUACAAGUUCAUCAAGCCCAUCCUGGAGAAGAUGGACGGC |
| | | ACAGAGGAGCUGCUGGUGAAGCUGAACAGGGAGGACCUGCUGCGGAAGCAGCGGA |
| | | CGUUCGACAAUGGGAGCAUCCCCCACCAGAUCCACCUGGGUGAGCUGCACGCCAU |
| | | CCUGCGGCGGCAGGAGGACUUCUACCCCUUCCUGAAGGACAACAGGGAGAAGAUC |
| | | GAGAAGAUCCUGACGUUCCGGAUCCCCUACUACGUUGGCCCCCUGGCCCGCGGCA |
| | | ACAGCCGGUUCGCCUGGAUGACGCGGAAGAGCGAGGAGACGAUCACUCCCUGGAA |
| | | CUUCGAGGAAGUCGUGGACAAGGGUGCCAGCGCCCAGAGCUUCAUCGAGCGGAUG |
| | | ACGAACUUCGACAAGAAUCUUCCAAACGAGAAGGUGCUUCCAAAGCACAGCCUGC |
| | | UGUACGAGUACUUCACGGUGUACAACGAGCUGACGAAGGUGAAGUACGUGACAGA |
| | | GGGCAUGCGGAAGCCCGCCUUCCUCAGCGGUGAGCAGAAGAAGGCCAUCGUGGAC |
| | | CUGCUGUUCAAGACGAACCGGAAGGUGACGGUGAAGCAGCUGAAGGAGGACUACU |
| | | UCAAGAAGAUCGAGUGCUUCGACAGCGUGGAGAUCAGCGGCGUGGAGGACCGGUU |
| | | CAACGCCAGCCUGGGCACCUACCACGACCUGCUGAAGAUCAUCAAGGACAAGGAC |
| | | UUCCUGGACAACGAGGAGAACGAGGACAUCCUGGAGGACAUCGUGCUGACGCUGA |
| | | CGCUGUUCGAGGACAGGGAGAUGAUAGAGGAGCGGCUGAAGACCUACGCCCACCU |
| | | GUUCGACGACAAGGUGAUGAAGCAGCUGAAGCGGCGGCGGUACACGGGCUGGGGC |
| | | CGGCUCAGCCGGAAGCUGAUCAAUGGGAUCCGAGACAAGCAGAGCGGCAAGACGA |
| | | UCCUGGACUUCCUGAAGAGCGACGGCUUCGCCAACCGGAACUUCAUGCAGCUGAU |
| | | CCACGACGACAGCCUGACGUUCAAGGAGGACAUCCAGAAGGCCCAGGUCAGCGGC |
| | | CAGGGCGACAGCCUGCACGAGCACAUCGCCAAUCUCGCCGGGAGCCCCGCCAUCA |
| | | AGAAGGGGAUCCUGCAGACGGUGAAGGUGGUGGACGAGCUGGUGAAGGUGAUGGG |
| | | CCGGCACAAGCCAGAGAACAUCGUGAUCGAGAUGGCCAGGGAGAACCAGACGACU |
| | | CAAAAGGGGCAGAAGAACAGCAGGGAGCGGAUGAAGCGGAUCGAGGAGGGCAUCA |
| | | AGGAGCUGGGCAGCCAGAUCCUGAAGGAGCACCCCGUGGAGAACACUCAACUGCA |
| | | GAACGAGAAGCUGUACCUGUACUACCUGCAGAAUGGGCGAGACAUGUACGUGGAC |
| | | CAGGAGCUGGACAUCAACCGGCUCAGCGACUACGACGUGGACCACAUCGUUCCCC |
| | | AGAGCUUCCUGAAGGACGACAGCAUCGACAACAAGGUGCUGACGCGGAGCGACAA |
| | | GAACCGGGGCAAGAGCGACAACGUUCCCUCAGAGGAAGUCGUGAAGAAGAUGAAG |
| | | AACUACUGGCGGCAGCUGCUGAACGCCAAGCUGAUCACUCAACGGAAGUUCGACA |
| | | AUCUCACGAAGGCCGAGCGGGGUGGCCUCAGCGAGCUGGACAAGGCCGGGUUCAU |
| | | CAAGCGGCAGCUGGUGGAGACGCGGCAGAUCACGAAGCACGUGGCCCAGAUCCUG |
| | | GACAGCCGGAUGAACACGAAGUACGACGAGAACGACAAGCUGAUCAGGGAAGUCA |
| | | AGGUGAUCACGCUGAAGAGCAAGCUGGUCAGCGACUUCCGGAAGGACUUCCAGUU |
| | | CUACAAGGUGAGGGAGAUCAACAACUACCACCACGCCCACGACGCCUACCUGAAC |
| | | GCUGUGGUUGGCACGGCACUGAUCAAGAAGUACCCCAAGCUGGAGAGCGAGUUCG |
| | | UGUACGGCGACUACAAGGUGUACGACGUGCGGAAGAUGAUAGCCAAGAGCGAGCA |
| | | GGAGAUCGGCAAGGCCACGGCCAAGUACUUCUUCUACAGCAACAUCAUGAACUUC |
| | | UUCAAGACAGAGAUCACGCUGGCCAAUGGUGAGAUCCGGAAGCGGCCCCUGAUCG |
| | | AGACGAAUGGUGAGACGGGUGAGAUCGUGUGGGACAAGGGGCGAGACUUCGCCAC |
| | | GGUGCGGAAGGUGCUCAGCAUGCCCCAGGUGAACAUCGUGAAGAAGACAGAAGUC |
| | | CAGACGGGUGGCUUCAGCAAGGAGAGCAUCCUUCCAAAGCGGAACAGCGACAAGC |
| | | UGAUCGCCCGCAAGAAGGACUGGGACCCCAAGAAGUACGGUGGCUUCGACAGCCC |
| | | CACCGUGGCCUACAGCGUGCUGGUGGUGGCCAAGGUGGAGAAGGGGAAGAGCAAG |
| | | AAGCUGAAGAGCGUGAAGGAGCUGCUGGGCAUCACGAUCAUGGAGCGGAGCAGCU |
| | | UCGAGAAGAACCCCAUCGACUUCCUGGAAGCCAAGGGGUACAAGGAAGUCAAGAA |
| | | GGACCUGAUCAUCAAGCUUCCAAAGUACAGCCUGUUCGAGCUGGAGAAUGGGCGG |
| | | AAGCGGAUGCUGGCCAGCGCCGGUGAGCUGCAGAAGGGGAACGAGCUGGCACUUC |
| | | CCUCAAAGUACGUGAACUUCCUGUACCUGGCCAGCCACUACGAGAAGCUGAAGGG |
| | | GAGCCCAGAGGACAACGAGCAGAAGCAGCUGUUCGUGGAGCAGCACAAGCACUAC |
| | | CUGGACGAGAUCAUCGAGCAGAUCAGCGAGUUCAGCAAGCGGGUGAUCCUGGCCG |
| | | ACGCCAAUCUCGACAAGGUGCUCAGCGCCUACAACAAGCACCGAGACAAGCCCAU |
| | | CAGGGAGCAGGCCGAGAACAUCAUCCACCUGUUCACGCUGACGAAUCUCGGUGCC |
| | | CCCGCUGCCUUCAAGUACUUCGACACGACGAUCGACCGGAAGCGGUACACGUCGA |
| | | CUAAGGAAGUCCUGGACGCCACGCUGAUCCACCAGAGCAUCACGGGCCUGUACGA |
| | | GACGCGGAUCGACCUCAGCCAGCUGGGUGGCGACGGUGGUGGCAGCCCCAAGAAG |
| | | AAGCGGAAGGUGUAG |
| 664 | ORF encoding Sp. | AUGGACAAGAAGUACAGCAUCGGCCUCGACAUCGGCACCAACAGCGUCGGCUGGG |
| | Cas9 | CCGUCAUCACCGACGAGUACAAGGUCCCCAGCAAGAAGUUCAAGGUCCUCGGCAA |
| | | CACCGACCGCCACAGCAUCAAGAAGAACCUCAUCGGCGCCCUCCUCUUCGACAGC |
| | | GGCGAGACCGCCGAGGCCACCCGCCUCAAGCGCACCGCCCGCCGCCGCUACACCC |
| | | GCCGCAAGAACCGCAUCUGCUACCUCCAGGAGAUCUUCAGCAACGAGAUGGCCAA |
| | | GGUCGACGACAGCUUCUUCCACCGCCUCGAGGAGAGCUUCCUCGUCGAGGAGGAC |
| | | AAGAAGCACGAGCGCCACCCCAUCUUCGGCAACAUCGUCGACGAGGUCGCCUACC |
| | | ACGAGAAGUACCCCACCAUCUACCACCUCCGCAAGAAGCUCGUCGACAGCACCGA |
| | | CAAGGCCGACCUCCGCCUCAUCUACCUCGCCCUCGCCCACAUGAUCAAGUUCCGC |
| | | GGCCACUUCCUCAUCGAGGGCGACCUCAACCCCGACAACAGCGACGUCGACAAGC |
| | | UCUUCAUCCAGCUCGUCCAGACCUACAACCAGCUCUUCGAGGAGAACCCCAUCAA |
| | | CGCCAGCGGCGUCGACGCCAAGGCCAUCCUCAGCGCCCGCCUCAGCAAGAGCCGC |
| | | CGCCUCGAGAACCUCAUCGCCCAGCUCCCCGGCGAGAAGAAGAACGGCCUCUUCG |
| | | GCAACCUCAUCGCCCUCAGCCUCGGCCUCACCCCCAACUUCAAGAGCAACUUCGA |
| | | CCUCGCCGAGGACGCCAAGCUCCAGCUCAGCAAGGACACCUACGACGACGACCUC |
| | | GACAACCUCCUCGCCCAGAUCGGCGACCAGUACGCCGACCUCUUCCUCGCCGCCA |
| | | AGAACCUCAGCGACGCCAUCCUCCUCAGCGACAUCCUCCGCGUCAACACCGAGAU |
| | | CACCAAGGCCCCCCUCAGCGCCAGCAUGAUCAAGCGCUACGACGAGCACCACCAG |
| | | GACCUCACCCUCCUCAAGGCCCUCGUCCGCCAGCAGCUCCCCGAGAAGUACAAGG |
| | | AGAUCUUCUUCGACCAGAGCAAGAACGGCUACGCCGGCUACAUCGACGGCGGCGC |
| | | CAGCCAGGAGGAGUUCUACAAGUUCAUCAAGCCCAUCCUCGAGAAGAUGGACGGC |
| | | ACCGAGGAGCUCCUCGUCAAGCUCAACCGCGAGGACCUCCUCCGCAAGCAGCGCA |
| | | CCUUCGACAACGGCAGCAUCCCCCACCAGAUCCACCUCGGCGAGCUCCACGCCAU |
| | | CCUCCGCCGCCAGGAGGACUUCUACCCCUUCCUCAAGGACAACCGCGAGAAGAUC |
| | | GAGAAGAUCCUCACCUUCCGCAUCCCCUACUACGUCGGCCCCCUCGCCCGCGGCA |
| | | ACAGCCGCUUCGCCUGGAUGACCCGCAAGAGCGAGGAGACCAUCACCCCCUGGAA |
| | | CUUCGAGGAGGUCGUCGACAAGGGCGCCAGCGCCCAGAGCUUCAUCGAGCGCAUG |
| | | ACCAACUUCGACAAGAACCUCCCCAACGAGAAGGUCCUCCCCAAGCACAGCCUCC |
| | | UCUACGAGUACUUCACCGUCUACAACGAGCUCACCAAGGUCAAGUACGUCACCGA |
| | | GGGCAUGCGCAAGCCCGCCUUCCUCAGCGGCGAGCAGAAGAAGGCCAUCGUCGAC |
| | | CUCCUCUUCAAGACCAACCGCAAGGUCACCGUCAAGCAGCUCAAGGAGGACUACU |
| | | UCAAGAAGAUCGAGUGCUUCGACAGCGUCGAGAUCAGCGGCGUCGAGGACCGCUU |
| | | CAACGCCAGCCUCGGCACCUACCACGACCUCCUCAAGAUCAUCAAGGACAAGGAC |
| | | UUCCUCGACAACGAGGAGAACGAGGACAUCCUCGAGGACAUCGUCCUCACCCUCA |
| | | CCCUCUUCGAGGACCGCGAGAUGAUCGAGGAGCGCCUCAAGACCUACGCCCACCU |
| | | CUUCGACGACAAGGUCAUGAAGCAGCUCAAGCGCCGCCGCUACACCGGCUGGGGC |
| | | CGCCUCAGCCGCAAGCUCAUCAACGGCAUCCGCGACAAGCAGAGCGGCAAGACCA |
| | | UCCUCGACUUCCUCAAGAGCGACGGCUUCGCCAACCGCAACUUCAUGCAGCUCAU |
| | | CCACGACGACAGCCUCACCUUCAAGGAGGACAUCCAGAAGGCCCAGGUCAGCGGC |
| | | CAGGGCGACAGCCUCCACGAGCACAUCGCCAACCUCGCCGGCAGCCCCGCCAUCA |
| | | AGAAGGGCAUCCUCCAGACCGUCAAGGUCGUCGACGAGCUCGUCAAGGUCAUGGG |
| | | CCGCCACAAGCCCGAGAACAUCGUCAUCGAGAUGGCCCGCGAGAACCAGACCACC |
| | | CAGAAGGGCCAGAAGAACAGCCGCGAGCGCAUGAAGCGCAUCGAGGAGGGCAUCA |
| | | AGGAGCUCGGCAGCCAGAUCCUCAAGGAGCACCCCGUCGAGAACACCCAGCUCCA |
| | | GAACGAGAAGCUCUACCUCUACUACCUCCAGAACGGCCGCGACAUGUACGUCGAC |
| | | CAGGAGCUCGACAUCAACCGCCUCAGCGACUACGACGUCGACCACAUCGUCCCCC |
| | | AGAGCUUCCUCAAGGACGACAGCAUCGACAACAAGGUCCUCACCCGCAGCGACAA |
| | | GAACCGCGGCAAGAGCGACAACGUCCCCAGCGAGGAGGUCGUCAAGAAGAUGAAG |
| | | AACUACUGGCGCCAGCUCCUCAACGCCAAGCUCAUCACCCAGCGCAAGUUCGACA |
| | | ACCUCACCAAGGCCGAGCGCGGCGGCCUCAGCGAGCUCGACAAGGCCGGCUUCAU |
| | | CAAGCGCCAGCUCGUCGAGACCCGCCAGAUCACCAAGCACGUCGCCCAGAUCCUC |
| | | GACAGCCGCAUGAACACCAAGUACGACGAGAACGACAAGCUCAUCCGCGAGGUCA |
| | | AGGUCAUCACCCUCAAGAGCAAGCUCGUCAGCGACUUCCGCAAGGACUUCCAGUU |
| | | CUACAAGGUCCGCGAGAUCAACAACUACCACCACGCCCACGACGCCUACCUCAAC |
| | | GCCGUCGUCGGCACCGCCCUCAUCAAGAAGUACCCCAAGCUCGAGAGCGAGUUCG |
| | | UCUACGGCGACUACAAGGUCUACGACGUCCGCAAGAUGAUCGCCAAGAGCGAGCA |
| | | GGAGAUCGGCAAGGCCACCGCCAAGUACUUCUUCUACAGCAACAUCAUGAACUUC |
| | | UUCAAGACCGAGAUCACCCUCGCCAACGGCGAGAUCCGCAAGCGCCCCCUCAUCG |
| | | AGACCAACGGCGAGACCGGCGAGAUCGUCUGGGACAAGGGCCGCGACUUCGCCAC |
| | | CGUCCGCAAGGUCCUCAGCAUGCCCCAGGUCAACAUCGUCAAGAAGACCGAGGUC |
| | | CAGACCGGCGGCUUCAGCAAGGAGAGCAUCCUCCCCAAGCGCAACAGCGACAAGC |
| | | UCAUCGCCCGCAAGAAGGACUGGGACCCCAAGAAGUACGGCGGCUUCGACAGCCC |
| | | CACCGUCGCCUACAGCGUCCUCGUCGUCGCCAAGGUCGAGAAGGGCAAGAGCAAG |
| | | AAGCUCAAGAGCGUCAAGGAGCUCCUCGGCAUCACCAUCAUGGAGCGCAGCAGCU |
| | | UCGAGAAGAACCCCAUCGACUUCCUCGAGGCCAAGGGCUACAAGGAGGUCAAGAA |
| | | GGACCUCAUCAUCAAGCUCCCCAAGUACAGCCUCUUCGAGCUCGAGAACGGCCGC |
| | | AAGCGCAUGCUCGCCAGCGCCGGCGAGCUCCAGAAGGGCAACGAGCUCGCCCUCC |
| | | CCAGCAAGUACGUCAACUUCCUCUACCUCGCCAGCCACUACGAGAAGCUCAAGGG |
| | | CAGCCCCGAGGACAACGAGCAGAAGCAGCUCUUCGUCGAGCAGCACAAGCACUAC |
| | | CUCGACGAGAUCAUCGAGCAGAUCAGCGAGUUCAGCAAGCGCGUCAUCCUCGCCG |
| | | ACGCCAACCUCGACAAGGUCCUCAGCGCCUACAACAAGCACCGCGACAAGCCCAU |
| | | CCGCGAGCAGGCCGAGAACAUCAUCCACCUCUUCACCCUCACCAACCUCGGCGCC |
| | | CCCGCCGCCUUCAAGUACUUCGACACCACCAUCGACCGCAAGCGCUACACCAGCA |
| | | CCAAGGAGGUCCUCGACGCCACCCUCAUCCACCAGAGCAUCACCGGCCUCUACGA |
| | | GACCCGCAUCGACCUCAGCCAGCUCGGCGGCGACGGCGGCGGCAGCCCCAAGAAG |
| | | AAGCGCAAGGUCUAG |
| 665 | ORF encoding Sp. | ATGGACAAGAAGTACAGCATCGGCCTGGACATCGGCACCAACAGCGTGGGCTGGG |
| | Cas9 | CCGTGATCACCGACGAGTACAAGGTGCCCAGCAAGAAGTTCAAGGTGCTGGGCAA |
| | | CACCGACCGGCACAGCATCAAGAAGAACCTGATCGGCGCCCTGCTGTTCGACAGC |
| | | GGCGAGACCGCCGAGGCCACCCGGCTGAAGCGGACCGCCCGGCGGCGGTACACCC |
| | | GGCGGAAGAACCGGATCTGCTACCTGCAGGAGATCTTCAGCAACGAGATGGCCAA |
| | | GGTGGACGACAGCTTCTTCCACCGGCTGGAGGAGAGCTTCCTGGTGGAGGAGGAC |
| | | AAGAAGCACGAGCGGCACCCCATCTTCGGCAACATCGTGGACGAGGTGGCCTACC |
| | | ACGAGAAGTACCCCACCATCTACCACCTGCGGAAGAAGCTGGTGGACAGCACCGA |
| | | CAAGGCCGACCTGCGGCTGATCTACCTGGCCCTGGCCCACATGATCAAGTTCCGG |
| | | GGCCACTTCCTGATCGAGGGCGACCTGAACCCCGACAACAGCGACGTGGACAAGC |
| | | TGTTCATCCAGCTGGTGCAGACCTACAACCAGCTGTTCGAGGAGAACCCCATCAA |
| | | CGCCAGCGGCGTGGACGCCAAGGCCATCCTGAGCGCCCGGCTGAGCAAGAGCCGG |
| | | CGGCTGGAGAACCTGATCGCCCAGCTGCCCGGCGAGAAGAAGAACGGCCTGTTCG |
| | | GCAACCTGATCGCCCTGAGCCTGGGCCTGACCCCCAACTTCAAGAGCAACTTCGA |
| | | CCTGGCCGAGGACGCCAAGCTGCAGCTGAGCAAGGACACCTACGACGACGACCTG |
| | | GACAACCTGCTGGCCCAGATCGGCGACCAGTACGCCGACCTGTTCCTGGCCGCCA |
| | | AGAACCTGAGCGACGCCATCCTGCTGAGCGACATCCTGCGGGTGAACACCGAGAT |
| | | CACCAAGGCCCCCCTGAGCGCCAGCATGATCAAGCGGTACGACGAGCACCACCAG |
| | | GACCTGACCCTGCTGAAGGCCCTGGTGCGGCAGCAGCTGCCCGAGAAGTACAAGG |
| | | AGATCTTCTTCGACCAGAGCAAGAACGGCTACGCCGGCTACATCGACGGCGGCGC |
| | | CAGCCAGGAGGAGTTCTACAAGTTCATCAAGCCCATCCTGGAGAAGATGGACGGC |
| | | ACCGAGGAGCTGCTGGTGAAGCTGAACCGGGAGGACCTGCTGCGGAAGCAGCGGA |
| | | CCTTCGACAACGGCAGCATCCCCCACCAGATCCACCTGGGCGAGCTGCACGCCAT |
| | | CCTGCGGCGGCAGGAGGACTTCTACCCCTTCCTGAAGGACAACCGGGAGAAGATC |
| | | GAGAAGATCCTGACCTTCCGGATCCCCTACTACGTGGGCCCCCTGGCCCGGGGCA |
| | | ACAGCCGGTTCGCCTGGATGACCCGGAAGAGCGAGGAGACCATCACCCCCTGGAA |
| | | CTTCGAGGAGGTGGTGGACAAGGGCGCCAGCGCCCAGAGCTTCATCGAGCGGATG |
| | | ACCAACTTCGACAAGAACCTGCCCAACGAGAAGGTGCTGCCCAAGCACAGCCTGC |
| | | TGTACGAGTACTTCACCGTGTACAACGAGCTGACCAAGGTGAAGTACGTGACCGA |
| | | GGGCATGCGGAAGCCCGCCTTCCTGAGCGGCGAGCAGAAGAAGGCCATCGTGGAC |
| | | CTGCTGTTCAAGACCAACCGGAAGGTGACCGTGAAGCAGCTGAAGGAGGACTACT |
| | | TCAAGAAGATCGAGTGCTTCGACAGCGTGGAGATCAGCGGCGTGGAGGACCGGTT |
| | | CAACGCCAGCCTGGGCACCTACCACGACCTGCTGAAGATCATCAAGGACAAGGAC |
| | | TTCCTGGACAACGAGGAGAACGAGGACATCCTGGAGGACATCGTGCTGACCCTGA |
| | | CCCTGTTCGAGGACCGGGAGATGATCGAGGAGCGGCTGAAGACCTACGCCCACCT |
| | | GTTCGACGACAAGGTGATGAAGCAGCTGAAGCGGCGGCGGTACACCGGCTGGGGC |
| | | CGGCTGAGCCGGAAGCTGATCAACGGCATCCGGGACAAGCAGAGCGGCAAGACCA |
| | | TCCTGGACTTCCTGAAGAGCGACGGCTTCGCCAACCGGAACTTCATGCAGCTGAT |
| | | CCACGACGACAGCCTGACCTTCAAGGAGGACATCCAGAAGGCCCAGGTGAGCGGC |
| | | CAGGGCGACAGCCTGCACGAGCACATCGCCAACCTGGCCGGCAGCCCCGCCATCA |
| | | AGAAGGGCATCCTGCAGACCGTGAAGGTGGTGGACGAGCTGGTGAAGGTGATGGG |
| | | CCGGCACAAGCCCGAGAACATCGTGATCGAGATGGCCCGGGAGAACCAGACCACC |
| | | CAGAAGGGCCAGAAGAACAGCCGGGAGCGGATGAAGCGGATCGAGGAGGGCATCA |
| | | AGGAGCTGGGCAGCCAGATCCTGAAGGAGCACCCCGTGGAGAACACCCAGCTGCA |
| | | GAACGAGAAGCTGTACCTGTACTACCTGCAGAACGGCCGGGACATGTACGTGGAC |
| | | CAGGAGCTGGACATCAACCGGCTGAGCGACTACGACGTGGACCACATCGTGCCCC |
| | | AGAGCTTCCTGAAGGACGACAGCATCGACAACAAGGTGCTGACCCGGAGCGACAA |
| | | GAACCGGGGCAAGAGCGACAACGTGCCCAGCGAGGAGGTGGTGAAGAAGATGAAG |
| | | AACTACTGGCGGCAGCTGCTGAACGCCAAGCTGATCACCCAGCGGAAGTTCGACA |
| | | ACCTGACCAAGGCCGAGCGGGGCGGCCTGAGCGAGCTGGACAAGGCCGGCTTCAT |
| | | CAAGCGGCAGCTGGTGGAGACCCGGCAGATCACCAAGCACGTGGCCCAGATCCTG |
| | | GACAGCCGGATGAACACCAAGTACGACGAGAACGACAAGCTGATCCGGGAGGTGA |
| | | AGGTGATCACCCTGAAGAGCAAGCTGGTGAGCGACTTCCGGAAGGACTTCCAGTT |
| | | CTACAAGGTGCGGGAGATCAACAACTACCACCACGCCCACGACGCCTACCTGAAC |
| | | GCCGTGGTGGGCACCGCCCTGATCAAGAAGTACCCCAAGCTGGAGAGCGAGTTCG |
| | | TGTACGGCGACTACAAGGTGTACGACGTGCGGAAGATGATCGCCAAGAGCGAGCA |
| | | GGAGATCGGCAAGGCCACCGCCAAGTACTTCTTCTACAGCAACATCATGAACTTC |
| | | TTCAAGACCGAGATCACCCTGGCCAACGGCGAGATCCGGAAGCGGCCCCTGATCG |
| | | AGACCAACGGCGAGACCGGCGAGATCGTGTGGGACAAGGGCCGGGACTTCGCCAC |
| | | CGTGCGGAAGGTGCTGAGCATGCCCCAGGTGAACATCGTGAAGAAGACCGAGGTG |
| | | CAGACCGGCGGCTTCAGCAAGGAGAGCATCCTGCCCAAGCGGAACAGCGACAAGC |
| | | TGATCGCCCGGAAGAAGGACTGGGACCCCAAGAAGTACGGCGGCTTCGACAGCCC |
| | | CACCGTGGCCTACAGCGTGCTGGTGGTGGCCAAGGTGGAGAAGGGCAAGAGCAAG |
| | | AAGCTGAAGAGCGTGAAGGAGCTGCTGGGCATCACCATCATGGAGCGGAGCAGCT |
| | | TCGAGAAGAACCCCATCGACTTCCTGGAGGCCAAGGGCTACAAGGAGGTGAAGAA |
| | | GGACCTGATCATCAAGCTGCCCAAGTACAGCCTGTTCGAGCTGGAGAACGGCCGG |
| | | AAGCGGATGCTGGCCAGCGCCGGCGAGCTGCAGAAGGGCAACGAGCTGGCCCTGC |
| | | CCAGCAAGTACGTGAACTTCCTGTACCTGGCCAGCCACTACGAGAAGCTGAAGGG |
| | | CAGCCCCGAGGACAACGAGCAGAAGCAGCTGTTCGTGGAGCAGCACAAGCACTAC |
| | | CTGGACGAGATCATCGAGCAGATCAGCGAGTTCAGCAAGCGGGTGATCCTGGCCG |
| | | ACGCCAACCTGGACAAGGTGCTGAGCGCCTACAACAAGCACCGGGACAAGCCCAT |
| | | CCGGGAGCAGGCCGAGAACATCATCCACCTGTTCACCCTGACCAACCTGGGCGCC |
| | | CCCGCCGCCTTCAAGTACTTCGACACCACCATCGACCGGAAGCGGTACACCAGCA |
| | | CCAAGGAGGTGCTGGACGCCACCCTGATCCACCAGAGCATCACCGGCCTGTACGA |
| | | GACCCGGATCGACCTGAGCCAGCTGGGCGGCGACGGCGGCGGCAGCCCCAAGAAG |
| | | AAGCGGAAGGTGTGA |
| 666 | amino acid | MDKKYSIGLDIGTNSVGWAVITDEYKVPSKKFKVLGNTDRHSIKKNLIGALLFDS |
| | sequence for Sp. | GETAEATRLKRTARRRYTRRKNRICYLQEIFSNEMAKVDDSFFHRLEESFLVEED |
| | Cas9 | KKHERHPIFGNIVDEVAYHEKYPTIYHLRKKLVDSTDKADLRLIYLALAHMIKER |
| | | GHFLIEGDLNPDNSDVDKLFIQLVQTYNQLFEENPINASGVDAKAILSARLSKSR |
| | | RLENLIAQLPGEKKNGLFGNLIALSLGLTPNEKSNFDLAEDAKLQLSKDTYDDDL |
| | | DNLLAQIGDQYADLFLAAKNLSDAILLSDILRVNTEITKAPLSASMIKRYDEHHQ |
| | | DLTLLKALVRQQLPEKYKEIFFDQSKNGYAGYIDGGASQEEFYKFIKPILEKMDG |
| | | TEELLVKLNREDLLRKQRTEDNGSIPHQIHLGELHAILRRQEDFYPFLKDNREKI |
| | | EKILTFRIPYYVGPLARGNSRFAWMTRKSEETITPWNFEEVVDKGASAQSFIERM |
| | | TNEDKNLPNEKVLPKHSLLYEYFTVYNELTKVKYVTEGMRKPAFLSGEQKKAIVD |
| | | LLEKTNRKVTVKQLKEDYFKKIECFDSVEISGVEDRENASLGTYHDLLKIIKDKD |
| | | ELDNEENEDILEDIVLTLTLFEDREMIEERLKTYAHLEDDKVMKQLKRRRYTGWG |
| | | RLSRKLINGIRDKQSGKTILDELKSDGFANRNFMQLIHDDSLTFKEDIQKAQVSG |
| | | QGDSLHEHIANLAGSPAIKKGILQTVKVVDELVKVMGRHKPENIVIEMARENQTT |
| | | QKGQKNSRERMKRIEEGIKELGSQILKEHPVENTQLQNEKLYLYYLQNGRDMYVD |
| | | QELDINRLSDYDVDHIVPQSFLKDDSIDNKVLTRSDKNRGKSDNVPSEEVVKKMK |
| | | NYWRQLLNAKLITQRKEDNLTKAERGGLSELDKAGFIKRQLVETRQITKHVAQIL |
| | | DSRMNTKYDENDKLIREVKVITLKSKLVSDERKDFQFYKVREINNYHHAHDAYLN |
| | | AVVGTALIKKYPKLESEFVYGDYKVYDVRKMIAKSEQEIGKATAKYFFYSNIMNF |
| | | FKTEITLANGEIRKRPLIETNGETGEIVWDKGRDFATVRKVLSMPQVNIVKKTEV |
| | | QTGGESKESILPKRNSDKLIARKKDWDPKKYGGEDSPTVAYSVLVVAKVEKGKSK |
| | | KLKSVKELLGITIMERSSFEKNPIDELEAKGYKEVKKDLIIKLPKYSLFELENGR |
| | | KRMLASAGELQKGNELALPSKYVNFLYLASHYEKLKGSPEDNEQKQLFVEQHKHY |
| | | LDEIIEQISEFSKRVILADANLDKVLSAYNKHRDKPIREQAENIIHLFTLTNLGA |
| | | PAAFKYEDTTIDRKRYTSTKEVLDATLIHQSITGLYETRIDLSQLGGDGGGSPKK |
| | | KRKV |
| 667 | Open reading | AUGGACAAGAAGUACUCCAUCGGCCUGGACAUCGGCACCAACUCCGUGGGCUGGG |
| | frame for Cas9 | CCGUGAUCACCGACGAGUACAAGGUGCCCUCCAAGAAGUUCAAGGUGCUGGGCAA |
| | with HiBiT tag | CACCGACCGGCACUCCAUCAAGAAGAACCUGAUCGGCGCCCUGCUGUUCGACUCC |
| | | GGCGAGACCGCCGAGGCCACCCGGCUGAAGCGGACCGCCCGGCGGCGGUACACCC |
| | | GGCGGAAGAACCGGAUCUGCUACCUGCAGGAGAUCUUCUCCAACGAGAUGGCCAA |
| | | GGUGGACGACUCCUUCUUCCACCGGCUGGAGGAGUCCUUCCUGGUGGAGGAGGAC |
| | | AAGAAGCACGAGCGGCACCCCAUCUUCGGCAACAUCGUGGACGAGGUGGCCUACC |
| | | ACGAGAAGUACCCCACCAUCUACCACCUGCGGAAGAAGCUGGUGGACUCCACCGA |
| | | CAAGGCCGACCUGCGGCUGAUCUACCUGGCCCUGGCCCACAUGAUCAAGUUCCGG |
| | | GGCCACUUCCUGAUCGAGGGCGACCUGAACCCCGACAACUCCGACGUGGACAAGC |
| | | UGUUCAUCCAGCUGGUGCAGACCUACAACCAGCUGUUCGAGGAGAACCCCAUCAA |
| | | CGCCUCCGGCGUGGACGCCAAGGCCAUCCUGUCCGCCCGGCUGUCCAAGUCCCGG |
| | | CGGCUGGAGAACCUGAUCGCCCAGCUGCCCGGCGAGAAGAAGAACGGCCUGUUCG |
| | | GCAACCUGAUCGCCCUGUCCCUGGGCCUGACCCCCAACUUCAAGUCCAACUUCGA |
| | | CCUGGCCGAGGACGCCAAGCUGCAGCUGUCCAAGGACACCUACGACGACGACCUG |
| | | GACAACCUGCUGGCCCAGAUCGGCGACCAGUACGCCGACCUGUUCCUGGCCGCCA |
| | | AGAACCUGUCCGACGCCAUCCUGCUGUCCGACAUCCUGCGGGUGAACACCGAGAU |
| | | CACCAAGGCCCCCCUGUCCGCCUCCAUGAUCAAGCGGUACGACGAGCACCACCAG |
| | | GACCUGACCCUGCUGAAGGCCCUGGUGCGGCAGCAGCUGCCCGAGAAGUACAAGG |
| | | AGAUCUUCUUCGACCAGUCCAAGAACGGCUACGCCGGCUACAUCGACGGCGGCGC |
| | | CUCCCAGGAGGAGUUCUACAAGUUCAUCAAGCCCAUCCUGGAGAAGAUGGACGGC |
| | | ACCGAGGAGCUGCUGGUGAAGCUGAACCGGGAGGACCUGCUGCGGAAGCAGCGGA |
| | | CCUUCGACAACGGCUCCAUCCCCCACCAGAUCCACCUGGGCGAGCUGCACGCCAU |
| | | CCUGCGGCGGCAGGAGGACUUCUACCCCUUCCUGAAGGACAACCGGGAGAAGAUC |
| | | GAGAAGAUCCUGACCUUCCGGAUCCCCUACUACGUGGGCCCCCUGGCCCGGGGCA |
| | | ACUCCCGGUUCGCCUGGAUGACCCGGAAGUCCGAGGAGACCAUCACCCCCUGGAA |
| | | CUUCGAGGAGGUGGUGGACAAGGGCGCCUCCGCCCAGUCCUUCAUCGAGCGGAUG |
| | | ACCAACUUCGACAAGAACCUGCCCAACGAGAAGGUGCUGCCCAAGCACUCCCUGC |
| | | UGUACGAGUACUUCACCGUGUACAACGAGCUGACCAAGGUGAAGUACGUGACCGA |
| | | GGGCAUGCGGAAGCCCGCCUUCCUGUCCGGCGAGCAGAAGAAGGCCAUCGUGGAC |
| | | CUGCUGUUCAAGACCAACCGGAAGGUGACCGUGAAGCAGCUGAAGGAGGACUACU |
| | | UCAAGAAGAUCGAGUGCUUCGACUCCGUGGAGAUCUCCGGCGUGGAGGACCGGUU |
| | | CAACGCCUCCCUGGGCACCUACCACGACCUGCUGAAGAUCAUCAAGGACAAGGAC |
| | | UUCCUGGACAACGAGGAGAACGAGGACAUCCUGGAGGACAUCGUGCUGACCCUGA |
| | | CCCUGUUCGAGGACCGGGAGAUGAUCGAGGAGCGGCUGAAGACCUACGCCCACCU |
| | | GUUCGACGACAAGGUGAUGAAGCAGCUGAAGCGGCGGCGGUACACCGGCUGGGGC |
| | | CGGCUGUCCCGGAAGCUGAUCAACGGCAUCCGGGACAAGCAGUCCGGCAAGACCA |
| | | UCCUGGACUUCCUGAAGUCCGACGGCUUCGCCAACCGGAACUUCAUGCAGCUGAU |
| | | CCACGACGACUCCCUGACCUUCAAGGAGGACAUCCAGAAGGCCCAGGUGUCCGGC |
| | | CAGGGCGACUCCCUGCACGAGCACAUCGCCAACCUGGCCGGCUCCCCCGCCAUCA |
| | | AGAAGGGCAUCCUGCAGACCGUGAAGGUGGUGGACGAGCUGGUGAAGGUGAUGGG |
| | | CCGGCACAAGCCCGAGAACAUCGUGAUCGAGAUGGCCCGGGAGAACCAGACCACC |
| | | CAGAAGGGCCAGAAGAACUCCCGGGAGCGGAUGAAGCGGAUCGAGGAGGGCAUCA |
| | | AGGAGCUGGGCUCCCAGAUCCUGAAGGAGCACCCCGUGGAGAACACCCAGCUGCA |
| | | GAACGAGAAGCUGUACCUGUACUACCUGCAGAACGGCCGGGACAUGUACGUGGAC |
| | | CAGGAGCUGGACAUCAACCGGCUGUCCGACUACGACGUGGACCACAUCGUGCCCC |
| | | AGUCCUUCCUGAAGGACGACUCCAUCGACAACAAGGUGCUGACCCGGUCCGACAA |
| | | GAACCGGGGCAAGUCCGACAACGUGCCCUCCGAGGAGGUGGUGAAGAAGAUGAAG |
| | | AACUACUGGCGGCAGCUGCUGAACGCCAAGCUGAUCACCCAGCGGAAGUUCGACA |
| | | ACCUGACCAAGGCCGAGCGGGGCGGCCUGUCCGAGCUGGACAAGGCCGGCUUCAU |
| | | CAAGCGGCAGCUGGUGGAGACCCGGCAGAUCACCAAGCACGUGGCCCAGAUCCUG |
| | | GACUCCCGGAUGAACACCAAGUACGACGAGAACGACAAGCUGAUCCGGGAGGUGA |
| | | AGGUGAUCACCCUGAAGUCCAAGCUGGUGUCCGACUUCCGGAAGGACUUCCAGUU |
| | | CUACAAGGUGCGGGAGAUCAACAACUACCACCACGCCCACGACGCCUACCUGAAC |
| | | GCCGUGGUGGGCACCGCCCUGAUCAAGAAGUACCCCAAGCUGGAGUCCGAGUUCG |
| | | UGUACGGCGACUACAAGGUGUACGACGUGCGGAAGAUGAUCGCCAAGUCCGAGCA |
| | | GGAGAUCGGCAAGGCCACCGCCAAGUACUUCUUCUACUCCAACAUCAUGAACUUC |
| | | UUCAAGACCGAGAUCACCCUGGCCAACGGCGAGAUCCGGAAGCGGCCCCUGAUCG |
| | | AGACCAACGGCGAGACCGGCGAGAUCGUGUGGGACAAGGGCCGGGACUUCGCCAC |
| | | CGUGCGGAAGGUGCUGUCCAUGCCCCAGGUGAACAUCGUGAAGAAGACCGAGGUG |
| | | CAGACCGGCGGCUUCUCCAAGGAGUCCAUCCUGCCCAAGCGGAACUCCGACAAGC |
| | | UGAUCGCCCGGAAGAAGGACUGGGACCCCAAGAAGUACGGCGGCUUCGACUCCCC |
| | | CACCGUGGCCUACUCCGUGCUGGUGGUGGCCAAGGUGGAGAAGGGCAAGUCCAAG |
| | | AAGCUGAAGUCCGUGAAGGAGCUGCUGGGCAUCACCAUCAUGGAGCGGUCCUCCU |
| | | UCGAGAAGAACCCCAUCGACUUCCUGGAGGCCAAGGGCUACAAGGAGGUGAAGAA |
| | | GGACCUGAUCAUCAAGCUGCCCAAGUACUCCCUGUUCGAGCUGGAGAACGGCCGG |
| | | AAGCGGAUGCUGGCCUCCGCCGGCGAGCUGCAGAAGGGCAACGAGCUGGCCCUGC |
| | | CCUCCAAGUACGUGAACUUCCUGUACCUGGCCUCCCACUACGAGAAGCUGAAGGG |
| | | CUCCCCCGAGGACAACGAGCAGAAGCAGCUGUUCGUGGAGCAGCACAAGCACUAC |
| | | CUGGACGAGAUCAUCGAGCAGAUCUCCGAGUUCUCCAAGCGGGUGAUCCUGGCCG |
| | | ACGCCAACCUGGACAAGGUGCUGUCCGCCUACAACAAGCACCGGGACAAGCCCAU |
| | | CCGGGAGCAGGCCGAGAACAUCAUCCACCUGUUCACCCUGACCAACCUGGGCGCC |
| | | CCCGCCGCCUUCAAGUACUUCGACACCACCAUCGACCGGAAGCGGUACACCUCCA |
| | | CCAAGGAGGUGCUGGACGCCACCCUGAUCCACCAGUCCAUCACCGGCCUGUACGA |
| | | GACCCGGAUCGACCUGUCCCAGCUGGGCGGCGACGGCGGCGGCUCCCCCAAGAAG |
| | | AAGCGGAAGGUGUCCGAGUCCGCCACCCCCGAGUCCGUGUCCGGCUGGCGGCUGU |
| | | UCAAGAAGAUCUCCUGA |
| 668 | Amino acid | MDKKYSIGLDIGTNSVGWAVITDEYKVPSKKFKVLGNTDRHSIKKNLIGALLEDS |
| | sequence for | GETAEATRLKRTARRRYTRRKNRICYLQEIFSNEMAKVDDSFFHRLEESFLVEED |
| | Cas9 with HiBiT | KKHERHPIFGNIVDEVAYHEKYPTIYHLRKKLVDSTDKADLRLIYLALAHMIKER |
| | tag | GHFLIEGDLNPDNSDVDKLFIQLVQTYNQLFEENPINASGVDAKAILSARLSKSR |
| | | RLENLIAQLPGEKKNGLFGNLIALSLGLTPNEKSNFDLAEDAKLQLSKDTYDDDL |
| | | DNLLAQIGDQYADLELAAKNLSDAILLSDILRVNTEITKAPLSASMIKRYDEHHQ |
| | | DLTLLKALVRQQLPEKYKEIFFDQSKNGYAGYIDGGASQEEFYKFIKPILEKMDG |
| | | TEELLVKLNREDLLRKQRTEDNGSIPHQIHLGELHAILRRQEDFYPFLKDNREKI |
| | | EKILTFRIPYYVGPLARGNSRFAWMTRKSEETITPWNFEEVVDKGASAQSFIERM |
| | | TNEDKNLPNEKVLPKHSLLYEYFTVYNELTKVKYVTEGMRKPAFLSGEQKKAIVD |
| | | LLFKTNRKVTVKQLKEDYFKKIECFDSVEISGVEDRENASLGTYHDLLKIIKDKD |
| | | ELDNEENEDILEDIVLTLTLFEDREMIEERLKTYAHLEDDKVMKQLKRRRYTGWG |
| | | RLSRKLINGIRDKQSGKTILDFLKSDGFANRNFMQLIHDDSLTFKEDIQKAQVSG |
| | | QGDSLHEHIANLAGSPAIKKGILQTVKVVDELVKVMGRHKPENIVIEMARENQTT |
| | | QKGQKNSRERMKRIEEGIKELGSQILKEHPVENTQLQNEKLYLYYLQNGRDMYVD |
| | | QELDINRLSDYDVDHIVPQSFLKDDSIDNKVLTRSDKNRGKSDNVPSEEVVKKMK |
| | | NYWRQLLNAKLITQRKFDNLTKAERGGLSELDKAGFIKRQLVETRQITKHVAQIL |
| | | DSRMNTKYDENDKLIREVKVITLKSKLVSDERKDFQFYKVREINNYHHAHDAYLN |
| | | AVVGTALIKKYPKLESEFVYGDYKVYDVRKMIAKSEQEIGKATAKYFFYSNIMNF |
| | | FKTEITLANGEIRKRPLIETNGETGEIVWDKGRDFATVRKVLSMPQVNIVKKTEV |
| | | QTGGFSKESILPKRNSDKLIARKKDWDPKKYGGEDSPTVAYSVLVVAKVEKGKSK |
| | | KLKSVKELLGITIMERSSFEKNPIDELEAKGYKEVKKDLIIKLPKYSLFELENGR |
| | | KRMLASAGELQKGNELALPSKYVNFLYLASHYEKLKGSPEDNEQKQLFVEQHKHY |
| | | LDEIIEQISEFSKRVILADANLDKVLSAYNKHRDKPIREQAENIIHLFTLTNLGA |
| | | PAAFKYFDTTIDRKRYTSTKEVLDATLIHQSITGLYETRIDLSQLGGDGGGSPKK |
| | | KRKVSESATPESVSGWRLFKKIS |
| 669 | SV40 NLS | PKKKRKV |
| 670 | Alternate SV40 | PKKKRRV |
| | NLS | |
| 671 | Exemplary NLS 1 | LAAKRSRTT |
| 672 | Exemplary NLS 2 | QAAKRSRTT |
| 673 | Exemplary NLS 3 | PAPAKRERTT |
| 674 | Exemplary NLS 4 | QAAKRPRTT |
| 675 | Exemplary NLS 5 | RAAKRPRTT |
| 676 | Exemplary NLS 6 | AAAKRSWSMAA |
| 677 | Exemplary NLS 7 | AAAKRVWSMAF |
| 678 | Exemplary NLS 8 | AAAKRSWSMAF |
| 679 | Exemplary NLS 9 | AAAKRKYFAA |
| 680 | Exemplary NLS | RAAKRKAFAA |
| | 10 | |
| 681 | Exemplary NLS | RAAKRKYFAV |
| | 11 | |
| 682 | Nucleoplasmin | KRPAATKKAGQAKKKK |
| | NLS | |
| 683 | Alternative | PKKKRKVE |
| | SV40 NLS | |
| 684 | Alternative | KKKRKVE |
| | SV40 NLS | |
| 685 | bipartite NLS | KRTADGSEFESPKKKRKVE |
| 686 | c-myc like NLS | PAAKKKKLD |
| 687-700 | Not used | |
| 701 | Exemplary | GGGAAGCUCAGAAUAAACGCUCAACUUUGGCCGGAUCUGCCACCAUGGACGGCUC |
| | sequence | CGGCGGCGGCUCCCCCAAGAAGAAGCGGAAGGUGGAGGACAAGCGGCCCGCCGCC |
| | encoding | ACCAAGAAGGCCGGCCAGGCCAAGAAGAAGAAGGGCGGCUCCGGCGGCGGCGCCG |
| | Nme2Cas 9 | CCUUCAAGCCCAACCCCAUCAACUACAUCCUGGGCCUGGACAUCGGCAUCGCCUC |
| | (mRNA | CGUGGGCUGGGCCAUGGUGGAGAUCGACGAGGAGGAGAACCCCAUCCGGCUGAUC |
| | AA) | GACCUGGGCGUGCGGGUGUUCGAGCGGGCCGAGGUGCCCAAGACCGGCGACUCCC |
| | | UGGCCAUGGCCCGGCGGCUGGCCCGGUCCGUGCGGCGGCUGACCCGGCGGCGGGC |
| | | CCACCGGCUGCUGCGGGCCCGGCGGCUGCUGAAGCGGGAGGGCGUGCUGCAGGCC |
| | | GCCGACUUCGACGAGAACGGCCUGAUCAAGUCCCUGCCCAACACCCCCUGGCAGC |
| | | UGCGGGCCGCCGCCCUGGACCGGAAGCUGACCCCCCUGGAGUGGUCCGCCGUGCU |
| | | GCUGCACCUGAUCAAGCACCGGGGCUACCUGUCCCAGCGGAAGAACGAGGGCGAG |
| | | ACCGCCGACAAGGAGCUGGGCGCCCUGCUGAAGGGCGUGGCCAACAACGCCCACG |
| | | CCCUGCAGACCGGCGACUUCCGGACCCCCGCCGAGCUGGCCCUGAACAAGUUCGA |
| | | GAAGGAGUCCGGCCACAUCCGGAACCAGCGGGGCGACUACUCCCACACCUUCUCC |
| | | CGGAAGGACCUGCAGGCCGAGCUGAUCCUGCUGUUCGAGAAGCAGAAGGAGUUCG |
| | | GCAACCCCCACGUGUCCGGCGGCCUGAAGGAGGGCAUCGAGACCCUGCUGAUGAC |
| | | CCAGCGGCCCGCCCUGUCCGGCGACGCCGUGCAGAAGAUGCUGGGCCACUGCACC |
| | | UUCGAGCCCGCCGAGCCCAAGGCCGCCAAGAACACCUACACCGCCGAGCGGUUCA |
| | | UCUGGCUGACCAAGCUGAACAACCUGCGGAUCCUGGAGCAGGGCUCCGAGCGGCC |
| | | CCUGACCGACACCGAGCGGGCCACCCUGAUGGACGAGCCCUACCGGAAGUCCAAG |
| | | CUGACCUACGCCCAGGCCCGGAAGCUGCUGGGCCUGGAGGACACCGCCUUCUUCA |
| | | AGGGCCUGCGGUACGGCAAGGACAACGCCGAGGCCUCCACCCUGAUGGAGAUGAA |
| | | GGCCUACCACGCCAUCUCCCGGGCCCUGGAGAAGGAGGGCCUGAAGGACAAGAAG |
| | | UCCCCCCUGAACCUGUCCUCCGAGCUGCAGGACGAGAUCGGCACCGCCUUCUCCC |
| | | UGUUCAAGACCGACGAGGACAUCACCGGCCGGCUGAAGGACCGGGUGCAGCCCGA |
| | | GAUCCUGGAGGCCCUGCUGAAGCACAUCUCCUUCGACAAGUUCGUGCAGAUCUCC |
| | | CUGAAGGCCCUGCGGCGGAUCGUGCCCCUGAUGGAGCAGGGCAAGCGGUACGACG |
| | | AGGCCUGCGCCGAGAUCUACGGCGACCACUACGGCAAGAAGAACACCGAGGAGAA |
| | | GAUCUACCUGCCCCCCAUCCCCGCCGACGAGAUCCGGAACCCCGUGGUGCUGCGG |
| | | GCCCUGUCCCAGGCCCGGAAGGUGAUCAACGGCGUGGUGCGGCGGUACGGCUCCC |
| | | CCGCCCGGAUCCACAUCGAGACCGCCCGGGAGGUGGGCAAGUCCUUCAAGGACCG |
| | | GAAGGAGAUCGAGAAGCGGCAGGAGGAGAACCGGAAGGACCGGGAGAAGGCCGCC |
| | | GCCAAGUUCCGGGAGUACUUCCCCAACUUCGUGGGCGAGCCCAAGUCCAAGGACA |
| | | UCCUGAAGCUGCGGCUGUACGAGCAGCAGCACGGCAAGUGCCUGUACUCCGGCAA |
| | | GGAGAUCAACCUGGUGCGGCUGAACGAGAAGGGCUACGUGGAGAUCGACCACGCC |
| | | CUGCCCUUCUCCCGGACCUGGGACGACUCCUUCAACAACAAGGUGCUGGUGCUGG |
| | | GCUCCGAGAACCAGAACAAGGGCAACCAGACCCCCUACGAGUACUUCAACGGCAA |
| | | GGACAACUCCCGGGAGUGGCAGGAGUUCAAGGCCCGGGUGGAGACCUCCCGGUUC |
| | | CCCCGGUCCAAGAAGCAGCGGAUCCUGCUGCAGAAGUUCGACGAGGACGGCUUCA |
| | | AGGAGUGCAACCUGAACGACACCCGGUACGUGAACCGGUUCCUGUGCCAGUUCGU |
| | | GGCCGACCACAUCCUGCUGACCGGCAAGGGCAAGCGGCGGGUGUUCGCCUCCAAC |
| | | GGCCAGAUCACCAACCUGCUGCGGGGCUUCUGGGGCCUGCGGAAGGUGCGGGCCG |
| | | AGAACGACCGGCACCACGCCCUGGACGCCGUGGUGGUGGCCUGCUCCACCGUGGC |
| | | CAUGCAGCAGAAGAUCACCCGGUUCGUGCGGUACAAGGAGAUGAACGCCUUCGAC |
| | | GGCAAGACCAUCGACAAGGAGACCGGCAAGGUGCUGCACCAGAAGACCCACUUCC |
| | | CCCAGCCCUGGGAGUUCUUCGCCCAGGAGGUGAUGAUCCGGGUGUUCGGCAAGCC |
| | | CGACGGCAAGCCCGAGUUCGAGGAGGCCGACACCCCCGAGAAGCUGCGGACCCUG |
| | | CUGGCCGAGAAGCUGUCCUCCCGGCCCGAGGCCGUGCACGAGUACGUGACCCCCC |
| | | UGUUCGUGUCCCGGGCCCCCAACCGGAAGAUGUCCGGCGCCCACAAGGACACCCU |
| | | GCGGUCCGCCAAGCGGUUCGUGAAGCACAACGAGAAGAUCUCCGUGAAGCGGGUG |
| | | UGGCUGACCGAGAUCAAGCUGGCCGACCUGGAGAACAUGGUGAACUACAAGAACG |
| | | GCCGGGAGAUCGAGCUGUACGAGGCCCUGAAGGCCCGGCUGGAGGCCUACGGCGG |
| | | CAACGCCAAGCAGGCCUUCGACCCCAAGGACAACCCCUUCUACAAGAAGGGCGGC |
| | | CAGCUGGUGAAGGCCGUGCGGGUGGAGAAGACCCAGGAGUCCGGCGUGCUGCUGA |
| | | ACAAGAAGAACGCCUACACCAUCGCCGACAACGGCGACAUGGUGCGGGUGGACGU |
| | | GUUCUGCAAGGUGGACAAGAAGGGCAAGAACCAGUACUUCAUCGUGCCCAUCUAC |
| | | GCCUGGCAGGUGGCCGAGAACAUCCUGCCCGACAUCGACUGCAAGGGCUACCGGA |
| | | UCGACGACUCCUACACCUUCUGCUUCUCCCUGCACAAGUACGACCUGAUCGCCUU |
| | | CCAGAAGGACGAGAAGUCCAAGGUGGAGUUCGCCUACUACAUCAACUGCGACUCC |
| | | UCCAACGGCCGGUUCUACCUGGCCUGGCACGACAAGGGCUCCAAGGAGCAGCAGU |
| | | UCCGGAUCUCCACCCAGAACCUGGUGCUGAUCCAGAAGUACCAGGUGAACGAGCU |
| | | GGGCAAGGAGAUCCGGCCCUGCCGGCUGAAGAAGCGGCCCCCCGUGCGGUAGCUA |
| | | GCACCAGCCUCAAGAACACCCGAAUGGAGUCUCUAAGCUACAUAAUACCAACUUA |
| | | CACUUUACAAAAUGUUGUCCCCCAAAAUGUAGCCAUUCGUAUCUGCUCCUAAUAA |
| | | AAAGAAAGUUUCUUCACAUUCUCAAAAAAAAAAAAAAAAAAAAAAAAAAAAAAAA |
| | | AAAAAAAAAAAAAAAAAAAAAAAAAAAAAAAAAAAAAAAAAAAAAAAAAAAAAAA |
| | | AAAAAAAAAAAAAAAAAAAAAAAAAAAAAAAAAAAAAAAAAAAAAAAAAAAAAAA |
| | | AAAAAAAAAAAAAAAAAAAAAAAAAAAAAAAAAAAAAAAAAAAAAAAAAAAAAAA |
| | | AAAAAAAAAAAAAAAAAAAAAAAAAAAAAAAAAAAAAAAAAAAAAAAAAAAAA |
| 702 | Exemplary | GGGUCCCGCAGUCGGCGUCCAGCGGCUCUGCUUGUUCGUGUGUGUGUCGUUGCAG |
| | sequence | GCCUUAUUCGGAUCCGCCACCAUGGCAGCAUUCAAGCCGAACUCGAUCAACUACA |
| | encoding | UCCUGGGACUGGACAUCGGAAUCGCAUCGGUCGGAUGGGCAAUGGUCGAAAUCGA |
| | Nme1Cas9 | CGAAGAAGAAAACCCGAUCAGACUGAUCGACCUGGGAGUCAGAGUCUUCGAAAGA |
| | (mRNA AB) | GCAGAAGUCCCGAAGACAGGAGACUCGCUGGCAAUGGCAAGAAGACUGGCAAGAU |
| | | CGGUCAGAAGACUGACAAGAAGAAGAGCACACAGACUGCUGAGAACAAGAAGACU |
| | | GCUGAAGAGAGAAGGAGUCCUGCAGGCAGCAAACUUCGACGAAAACGGACUGAUC |
| | | AAGUCGCUGCCGAACACACCGUGGCAGCUGAGAGCAGCAGCACUGGACAGAAAGC |
| | | UGACACCGCUGGAAUGGUCGGCAGUCCUGCUGCACCUGAUCAAGCACAGAGGAUA |
| | | CCUGUCGCAGAGAAAGAACGAAGGAGAAACAGCAGACAAGGAACUGGGAGCACUG |
| | | CUGAAGGGAGUCGCAGGAAACGCACACGCACUGCAGACAGGAGACUUCAGAACAC |
| | | CGGCAGAACUGGCACUGAACAAGUUCGAAAAGGAAUCGGGACACAUCAGAAACCA |
| | | GAGAUCGGACUACUCGCACACAUUCUCGAGAAAGGACCUGCAGGCAGAACUGAUC |
| | | CUGCUGUUCGAAAAGCAGAAGGAAUUCGGAAACCCGCACGUCUCGGGAGGACUGA |
| | | AGGAAGGAAUCGAAACACUGCUGAUGACACAGAGACCGGCACUGUCGGGAGACGC |
| | | AGUCCAGAAGAUGCUGGGACACUGCACAUUCGAACCGGCAGAACCGAAGGCAGCA |
| | | AAGAACACAUACACAGCAGAAAGAUUCAUCUGGCUGACAAAGCUGAACAACCUGA |
| | | GAAUCCUGGAACAGGGAUCGGAAAGACCGCUGACAGACACAGAAAGAGCAACACU |
| | | GAUGGACGAACCGUACAGAAAGUCGAAGCUGACAUACGCACAGGCAAGAAAGCUG |
| | | CUGGGACUGGAAGACACAGCAUUCUUCAAGGGACUGAGAUACGGAAAGGACAACG |
| | | CAGAAGCAUCGACACUGAUGGAAAUGAAGGCAUACCACGCAAUCUCGAGAGCACU |
| | | GGAAAAGGAAGGACUGAAGGACAAGAAGUCGCCGCUGAACCUGUCGCCGGAACUG |
| | | CAGGACGAAAUCGGAACAGCAUUCUCGCUGUUCAAGACAGACGAAGACAUCACAG |
| | | GAAGACUGAAGGACAGAAUCCAGCCGGAAAUCCUGGAAGCACUGCUGAAGCACAU |
| | | CUCGUUCGACAAGUUCGUCCAGAUCUCGCUGAAGGCACUGAGAAGAAUCGUCCCG |
| | | CUGAUGGAACAGGGAAAGAGAUACGACGAAGCAUGCGCAGAAAUCUACGGAGACC |
| | | ACUACGGAAAGAAGAACACAGAAGAAAAGAUCUACCUGCCGCCGAUCCCGGCAGA |
| | | CGAAAUCAGAAACCCGGUCGUCCUGAGAGCACUGUCGCAGGCAAGAAAGGUCAUC |
| | | AACGGAGUCGUCAGAAGAUACGGAUCGCCGGCAAGAAUCCACAUCGAAACAGCAA |
| | | GAGAAGUCGGAAAGUCGUUCAAGGACAGAAAGGAAAUCGAAAAGAGACAGGAAGA |
| | | AAACAGAAAGGACAGAGAAAAGGCAGCAGCAAAGUUCAGAGAAUACUUCCCGAAC |
| | | UUCGUCGGAGAACCGAAGUCGAAGGACAUCCUGAAGCUGAGACUGUACGAACAGC |
| | | AGCACGGAAAGUGCCUGUACUCGGGAAAGGAAAUCAACCUGGGAAGACUGAACGA |
| | | AAAGGGAUACGUCGAAAUCGACCACGCACUGCCGUUCUCGAGAACAUGGGACGAC |
| | | UCGUUCAACAACAAGGUCCUGGUCCUGGGAUCGGAAAACCAGAACAAGGGAAACC |
| | | AGACACCGUACGAAUACUUCAACGGAAAGGACAACUCGAGAGAAUGGCAGGAAUU |
| | | CAAGGCAAGAGUCGAAACAUCGAGAUUCCCGAGAUCGAAGAAGCAGAGAAUCCUG |
| | | CUGCAGAAGUUCGACGAAGACGGAUUCAAGGAAAGAAACCUGAACGACACAAGAU |
| | | ACGUCAACAGAUUCCUGUGCCAGUUCGUCGCAGACAGAAUGAGACUGACAGGAAA |
| | | GGGAAAGAAGAGAGUCUUCGCAUCGAACGGACAGAUCACAAACCUGCUGAGAGGA |
| | | UUCUGGGGACUGAGAAAGGUCAGAGCAGAAAACGACAGACACCACGCACUGGACG |
| | | CAGUCGUCGUCGCAUGCUCGACAGUCGCAAUGCAGCAGAAGAUCACAAGAUUCGU |
| | | CAGAUACAAGGAAAUGAACGCAUUCGACGGAAAGACAAUCGACAAGGAAACAGGA |
| | | GAAGUCCUGCACCAGAAGACACACUUCCCGCAGCCGUGGGAAUUCUUCGCACAGG |
| | | AAGUCAUGAUCAGAGUCUUCGGAAAGCCGGACGGAAAGCCGGAAUUCGAAGAAGC |
| | | AGACACACUGGAAAAGCUGAGAACACUGCUGGCAGAAAAGCUGUCGUCGAGACCG |
| | | GAAGCAGUCCACGAAUACGUCACACCGCUGUUCGUCUCGAGAGCACCGAACAGAA |
| | | AGAUGUCGGGACAGGGACACAUGGAAACAGUCAAGUCGGCAAAGAGACUGGACGA |
| | | AGGAGUCUCGGUCCUGAGAGUCCCGCUGACACAGCUGAAGCUGAAGGACCUGGAA |
| | | AAGAUGGUCAACAGAGAAAGAGAACCGAAGCUGUACGAAGCACUGAAGGCAAGAC |
| | | UGGAAGCACACAAGGACGACCCGGCAAAGGCAUUCGCAGAACCGUUCUACAAGUA |
| | | CGACAAGGCAGGAAACAGAACACAGCAGGUCAAGGCAGUCAGAGUCGAACAGGUC |
| | | CAGAAGACAGGAGUCUGGGUCAGAAACCACAACGGAAUCGCAGACAACGCAACAA |
| | | UGGUCAGAGUAGACGUCUUCGAAAAGGGAGACAAGUACUACCUGGUCCCGAUCUA |
| | | CUCGUGGCAGGUCGCAAAGGGAAUCCUGCCGGACAGAGCAGUCGUCCAGGGAAAG |
| | | GACGAAGAAGACUGGCAGCUGAUCGACGACUCGUUCAACUUCAAGUUCUCGCUGC |
| | | ACCCGAACGACCUGGUCGAAGUCAUCACAAAGAAGGCAAGAAUGUUCGGAUACUU |
| | | CGCAUCGUGCCACAGAGGAACAGGAAACAUCAACAUCAGAAUCCACGACCUGGAC |
| | | CACAAGAUCGGAAAGAACGGAAUCCUGGAAGGAAUCGGAGUCAAGACAGCACUGU |
| | | CGUUCCAGAAGUACCAGAUCGACGAACUGGGAAAGGAAAUCAGACCGUGCAGACU |
| | | GAAGAAGAGACCGCCGGUCAGAUCCGGAAAGAGAACAGCAGACGGAUCGGAAUUC |
| | | GAAUCGCCGAAGAAGAAGAGAAAGGUCGAAUGAUAGCUAGCCAUCACAUUUAAAA |
| | | GCAUCUCAGCCUACCAUGAGAAUAAGAGAAAGAAAAUGAAGAUCAAUAGCUUAUU |
| | | CAUCUCUUUUUCUUUUUCGUUGGUGUAAAGCCAACACCCUGUCUAAAAAACAUAA |
| | | AUUUCUUUAAUCAUUUUGCCUCUUUUCUCUGUGCUUCAAUUAAUAAAAAAUGGAA |
| | | AGAACCUCGAGAAAAAAAAAAAAAAAAAAAAAAAAAAAAAAAAAAAAAAAAAAAA |
| | | AAAAAAAAAAAAAAAAAAAAAAAAAAAAAAAAAAAAAAAAAAAAAAAAAUCUAG |
| 703 | Exemplary | GGGAAGCUCAGAAUAAACGCUCAACUUUGGCCGGAUCUGCCACCAUGGACGGCUC |
| | sequence | CGGCGGCGGCUCCCCCAAGAAGAAGCGGAAGGUGGAGGACAAGCGGCCCGCCGCC |
| | encoding | ACCAAGAAGGCCGGCCAGGCCAAGAAGAAGAAGGGCGGCUCCGGCGGCGGCGCCG |
| | Nme2Cas9 | CCUUCAAGCCCAACCCCAUCAACUACAUCCUGGGCCUGGACAUCGGCAUCGCCUC |
| | with | CGUGGGCUGGGCCAUGGUGGAGAUCGACGAGGAGGAGAACCCCAUCCGGCUGAUC |
| | HiBiT tag | GACCUGGGCGUGCGGGUGUUCGAGCGGGCCGAGGUGCCCAAGACCGGCGACUCCC |
| | (mRNA V) | UGGCCAUGGCCCGGCGGCUGGCCCGGUCCGUGCGGCGGCUGACCCGGCGGCGGGC |
| | | CCACCGGCUGCUGCGGGCCCGGCGGCUGCUGAAGCGGGAGGGCGUGCUGCAGGCC |
| | | GCCGACUUCGACGAGAACGGCCUGAUCAAGUCCCUGCCCAACACCCCCUGGCAGC |
| | | UGCGGGCCGCCGCCCUGGACCGGAAGCUGACCCCCCUGGAGUGGUCCGCCGUGCU |
| | | GCUGCACCUGAUCAAGCACCGGGGCUACCUGUCCCAGCGGAAGAACGAGGGCGAG |
| | | ACCGCCGACAAGGAGCUGGGCGCCCUGCUGAAGGGCGUGGCCAACAACGCCCACG |
| | | CCCUGCAGACCGGCGACUUCCGGACCCCCGCCGAGCUGGCCCUGAACAAGUUCGA |
| | | GAAGGAGUCCGGCCACAUCCGGAACCAGCGGGGCGACUACUCCCACACCUUCUCC |
| | | CGGAAGGACCUGCAGGCCGAGCUGAUCCUGCUGUUCGAGAAGCAGAAGGAGUUCG |
| | | GCAACCCCCACGUGUCCGGCGGCCUGAAGGAGGGCAUCGAGACCCUGCUGAUGAC |
| | | CCAGCGGCCCGCCCUGUCCGGCGACGCCGUGCAGAAGAUGCUGGGCCACUGCACC |
| | | UUCGAGCCCGCCGAGCCCAAGGCCGCCAAGAACACCUACACCGCCGAGCGGUUCA |
| | | UCUGGCUGACCAAGCUGAACAACCUGCGGAUCCUGGAGCAGGGCUCCGAGCGGCC |
| | | CCUGACCGACACCGAGCGGGCCACCCUGAUGGACGAGCCCUACCGGAAGUCCAAG |
| | | CUGACCUACGCCCAGGCCCGGAAGCUGCUGGGCCUGGAGGACACCGCCUUCUUCA |
| | | AGGGCCUGCGGUACGGCAAGGACAACGCCGAGGCCUCCACCCUGAUGGAGAUGAA |
| | | GGCCUACCACGCCAUCUCCCGGGCCCUGGAGAAGGAGGGCCUGAAGGACAAGAAG |
| | | UCCCCCCUGAACCUGUCCUCCGAGCUGCAGGACGAGAUCGGCACCGCCUUCUCCC |
| | | UGUUCAAGACCGACGAGGACAUCACCGGCCGGCUGAAGGACCGGGUGCAGCCCGA |
| | | GAUCCUGGAGGCCCUGCUGAAGCACAUCUCCUUCGACAAGUUCGUGCAGAUCUCC |
| | | CUGAAGGCCCUGCGGCGGAUCGUGCCCCUGAUGGAGCAGGGCAAGCGGUACGACG |
| | | AGGCCUGCGCCGAGAUCUACGGCGACCACUACGGCAAGAAGAACACCGAGGAGAA |
| | | GAUCUACCUGCCCCCCAUCCCCGCCGACGAGAUCCGGAACCCCGUGGUGCUGCGG |
| | | GCCCUGUCCCAGGCCCGGAAGGUGAUCAACGGCGUGGUGCGGCGGUACGGCUCCC |
| | | CCGCCCGGAUCCACAUCGAGACCGCCCGGGAGGUGGGCAAGUCCUUCAAGGACCG |
| | | GAAGGAGAUCGAGAAGCGGCAGGAGGAGAACCGGAAGGACCGGGAGAAGGCCGCC |
| | | GCCAAGUUCCGGGAGUACUUCCCCAACUUCGUGGGCGAGCCCAAGUCCAAGGACA |
| | | UCCUGAAGCUGCGGCUGUACGAGCAGCAGCACGGCAAGUGCCUGUACUCCGGCAA |
| | | GGAGAUCAACCUGGUGCGGCUGAACGAGAAGGGCUACGUGGAGAUCGACCACGCC |
| | | CUGCCCUUCUCCCGGACCUGGGACGACUCCUUCAACAACAAGGUGCUGGUGCUGG |
| | | GCUCCGAGAACCAGAACAAGGGCAACCAGACCCCCUACGAGUACUUCAACGGCAA |
| | | GGACAACUCCCGGGAGUGGCAGGAGUUCAAGGCCCGGGUGGAGACCUCCCGGUUC |
| | | CCCCGGUCCAAGAAGCAGCGGAUCCUGCUGCAGAAGUUCGACGAGGACGGCUUCA |
| | | AGGAGUGCAACCUGAACGACACCCGGUACGUGAACCGGUUCCUGUGCCAGUUCGU |
| | | GGCCGACCACAUCCUGCUGACCGGCAAGGGCAAGCGGCGGGUGUUCGCCUCCAAC |
| | | GGCCAGAUCACCAACCUGCUGCGGGGCUUCUGGGGCCUGCGGAAGGUGCGGGCCG |
| | | AGAACGACCGGCACCACGCCCUGGACGCCGUGGUGGUGGCCUGCUCCACCGUGGC |
| | | CAUGCAGCAGAAGAUCACCCGGUUCGUGCGGUACAAGGAGAUGAACGCCUUCGAC |
| | | GGCAAGACCAUCGACAAGGAGACCGGCAAGGUGCUGCACCAGAAGACCCACUUCC |
| | | CCCAGCCCUGGGAGUUCUUCGCCCAGGAGGUGAUGAUCCGGGUGUUCGGCAAGCC |
| | | CGACGGCAAGCCCGAGUUCGAGGAGGCCGACACCCCCGAGAAGCUGCGGACCCUG |
| | | CUGGCCGAGAAGCUGUCCUCCCGGCCCGAGGCCGUGCACGAGUACGUGACCCCCC |
| | | UGUUCGUGUCCCGGGCCCCCAACCGGAAGAUGUCCGGCGCCCACAAGGACACCCU |
| | | GCGGUCCGCCAAGCGGUUCGUGAAGCACAACGAGAAGAUCUCCGUGAAGCGGGUG |
| | | UGGCUGACCGAGAUCAAGCUGGCCGACCUGGAGAACAUGGUGAACUACAAGAACG |
| | | GCCGGGAGAUCGAGCUGUACGAGGCCCUGAAGGCCCGGCUGGAGGCCUACGGCGG |
| | | CAACGCCAAGCAGGCCUUCGACCCCAAGGACAACCCCUUCUACAAGAAGGGCGGC |
| | | CAGCUGGUGAAGGCCGUGCGGGUGGAGAAGACCCAGGAGUCCGGCGUGCUGCUGA |
| | | ACAAGAAGAACGCCUACACCAUCGCCGACAACGGCGACAUGGUGCGGGUGGACGU |
| | | GUUCUGCAAGGUGGACAAGAAGGGCAAGAACCAGUACUUCAUCGUGCCCAUCUAC |
| | | GCCUGGCAGGUGGCCGAGAACAUCCUGCCCGACAUCGACUGCAAGGGCUACCGGA |
| | | UCGACGACUCCUACACCUUCUGCUUCUCCCUGCACAAGUACGACCUGAUCGCCUU |
| | | CCAGAAGGACGAGAAGUCCAAGGUGGAGUUCGCCUACUACAUCAACUGCGACUCC |
| | | UCCAACGGCCGGUUCUACCUGGCCUGGCACGACAAGGGCUCCAAGGAGCAGCAGU |
| | | UCCGGAUCUCCACCCAGAACCUGGUGCUGAUCCAGAAGUACCAGGUGAACGAGCU |
| | | GGGCAAGGAGAUCCGGCCCUGCCGGCUGAAGAAGCGGCCCCCCGUGCGGUCCGAG |
| | | UCCGCCACCCCCGAGUCCGUGUCCGGCUGGCGGCUGUUCAAGAAGAUCUCCUAGC |
| | | UAGCACCAGCCUCAAGAACACCCGAAUGGAGUCUCUAAGCUACAUAAUACCAACU |
| | | UACACUUUACAAAAUGUUGUCCCCCAAAAUGUAGCCAUUCGUAUCUGCUCCUAAU |
| | | AAAAAGAAAGUUUCUUCACAUUCUAAAAAAAAAAAAUGGAAAAAAAAAAAACGGA |
| | | AAAAAAAAAAAGGUAAAAAAAAAAAAUAUAAAAAAAAAAAACAUAAAAAAAAAAA |
| | | ACGAAAAAAAAAAAACGUAAAAAAAAAAAACUCAAAAAAAAAAAAGAUAAAAAAA |
| | | AAAAACCUAAAAAAAAAAAAUGUAAAAAAAAAAAAGGGAAAAAAAAAAAACGCAA |
| | | AAAAAAAAAACACAAAAAAAAAAAAUGCAAAAAAAAAAAAUCGAAAAAAAAAAAA |
| | | UCUAAAAAAAAAAAACGAAAAAAAAAAAACCCAAAAAAAAAAAAGACAAAAAAAA |
| | | AAAAUAGAAAAAAAAAAAAGUUAAAAAAAAAAAACUGAAAAAAAAAAAAUUUAAA |
| | | AAAAAAAAAUCUCGA |
| 704 | Exemplary | GGGAAGCUCAGAAUAAACGCUCAACUUUGGCCGGAUCUGCCACCAUGGACGGCUC |
| | sequence | CGGCGGCGGCUCCCCCAAGAAGAAGCGGAAGGUGGAGGACAAGCGGCCCGCCGCC |
| | encoding | ACCAAGAAGGCCGGCCAGGCCAAGAAGAAGAAGGGCGGCUCCGGCGGCGGCGCAG |
| | Nme1Cas9 with | CAUUCAAGCCAAACUCAAUCAAUUACAUCCUGGGACUGGACAUCGGCAUCGCAUC |
| | HiBiT tag | CGUCGGGUGGGCUAUGGUCGAAAUCGACGAGGAGGAGAACCCCAUCCGCCUGAUC |
| | (mRNA X) | GAUCUGGGCGUGCGCGUGUUUGAGAGGGCAGAGGUGCCUAAGACCGGCGACAGCC |
| | | UGGCCAUGGCACGGAGACUGGCACGCUCCGUGAGGCGCCUGACCCGGAGAAGGGC |
| | | CCACAGACUGCUGAGGACACGCCGGCUGCUGAAGAGGGAGGGCGUGCUGCAGGCC |
| | | GCCAACUUCGAUGAGAAUGGCCUGAUCAAGUCCCUGCCCAAUACCCCUUGGCAGC |
| | | UGAGGGCAGCCGCCCUGGACCGCAAGCUGACACCUCUGGAGUGGUCCGCCGUGCU |
| | | GCUGCACCUGAUCAAGCACCGGGGCUACCUGUCUCAGAGAAAGAACGAGGGCGAG |
| | | ACAGCCGAUAAGGAGCUGGGCGCCCUGCUGAAGGGAGUGGCAGGAAAUGCACACG |
| | | CCCUGCAGACCGGCGACUUUCGCACACCAGCCGAGCUGGCCCUGAACAAGUUCGA |
| | | GAAGGAGAGCGGCCACAUCCGCAAUCAGCGGUCUGACUAUAGCCACACCUUCUCC |
| | | CGGAAGGAUCUGCAGGCCGAGCUGAUCCUGCUGUUUGAGAAGCAGAAGGAGUUCG |
| | | GCAACCCACACGUGUCUGGCGGCCUGAAGGAGGGCAUCGAGACACUGCUGAUGAC |
| | | ACAGCGGCCCGCCCUGAGCGGCGACGCAGUGCAGAAGAUGCUGGGACACUGCACC |
| | | UUUGAGCCAGCCGAGCCCAAGGCCGCCAAGAAUACCUACACAGCCGAGCGGUUCA |
| | | UCUGGCUGACAAAGCUGAACAAUCUGAGGAUCCUGGAGCAGGGAAGCGAGCGCCC |
| | | ACUGACCGACACAGAGAGGGCCACCCUGAUGGAUGAGCCCUACCGCAAGUCCAAG |
| | | CUGACAUAUGCACAGGCAAGGAAGCUGCUGGGCCUGGAGGACACCGCCUUCUUUA |
| | | AGGGCCUGAGAUACGGCAAGGAUAACGCCGAGGCCUCUACACUGAUGGAGAUGAA |
| | | GGCCUAUCACGCCAUCAGCAGGGCCCUGGAGAAGGAGGGCCUGAAGGACAAGAAG |
| | | UCCCCACUGAAUCUGUCUCCCGAGCUGCAGGAUGAGAUCGGCACCGCCUUUAGCC |
| | | UGUUCAAGACCGACGAGGAUAUCACAGGCAGACUGAAGGACAGGAUCCAGCCAGA |
| | | GAUCCUGGAGGCCCUGCUGAAGCACAUCAGCUUUGAUAAGUUCGUGCAGAUCAGC |
| | | CUGAAGGCCCUGCGGAGGAUCGUGCCACUGAUGGAGCAGGGCAAGAGGUACGACG |
| | | AGGCCUGCGCCGAAAUCUACGGCGAUCACUAUGGCAAGAAGAACACAGAGGAGAA |
| | | AAUCUACCUGCCCCCUAUCCCCGCCGAUGAGAUCAGGAACCCUGUGGUGCUGCGC |
| | | GCCCUGUCUCAGGCAAGAAAAGUGAUCAACGGAGUGGUGCGCCGGUACGGCAGCC |
| | | CCGCCAGAAUCCACAUCGAGACAGCCAGGGAAGUGGGCAAGUCCUUUAAGGACAG |
| | | AAAGGAGAUCGAGAAGAGGCAGGAGGAGAACAGAAAGGAUAGGGAGAAGGCCGCC |
| | | GCCAAGUUCAGAGAGUACUUUCCUAAUUUCGUGGGCGAGCCAAAGUCCAAGGAUA |
| | | UCCUGAAGCUGAGGCUGUACGAGCAGCAGCACGGCAAGUGUCUGUAUUCUGGCAA |
| | | GGAGAUCAACCUGGGCCGCCUGAAUGAGAAGGGCUAUGUGGAGAUCGACCACGCC |
| | | CUGCCUUUUUCUCGGACCUGGGACGAUAGCUUCAACAAUAAGGUGCUGGUGCUGG |
| | | GCUCUGAGAACCAGAAUAAGGGCAACCAGACACCCUACGAGUAUUUCAACGGCAA |
| | | GGACAAUAGCCGCGAGUGGCAGGAGUUUAAGGCAAGGGUGGAGACAAGCAGGUUC |
| | | CCUCGGUCCAAGAAGCAGAGAAUCCUGCUGCAGAAGUUUGACGAGGAUGGCUUCA |
| | | AGGAGAGGAACCUGAAUGACACCCGCUACGUGAAUCGGUUUCUGUGCCAGUUCGU |
| | | GGCCGAUAGAAUGAGGCUGACCGGCAAGGGCAAGAAGAGAGUGUUUGCCUCCAAC |
| | | GGCCAGAUCACAAAUCUGCUGAGGGGCUUCUGGGGCCUGAGAAAGGUGAGGGCAG |
| | | AGAACGACAGGCACCACGCACUGGAUGCAGUGGUGGUGGCAUGUUCUACCGUGGC |
| | | CAUGCAGCAGAAGAUCACACGCUUUGUGCGGUAUAAGGAGAUGAAUGCCUUCGAC |
| | | GGCAAGACCAUCGAUAAGGAGACAGGCGAGGUGCUGCACCAGAAGACACACUUUC |
| | | CUCAGCCAUGGGAGUUCUUUGCCCAGGAAGUGAUGAUCCGGGUGUUUGGCAAGCC |
| | | UGACGGCAAGCCAGAGUUCGAGGAGGCCGAUACCCUGGAGAAGCUGAGAACACUG |
| | | CUGGCAGAGAAGCUGAGCUCCAGGCCCGAGGCAGUGCACGAGUACGUGACCCCAC |
| | | UGUUCGUGUCUAGAGCCCCCAACAGGAAGAUGAGCGGCCAGGGCCACAUGGAGAC |
| | | AGUGAAGUCCGCCAAGAGACUGGACGAGGGCGUGUCUGUGCUGAGGGUGCCUCUG |
| | | ACACAGCUGAAGCUGAAGGAUCUGGAGAAGAUGGUGAAUCGCGAGCGGGAGCCAA |
| | | AGCUGUAUGAGGCCCUGAAGGCAAGGCUGGAGGCACACAAGGACGAUCCUGCCAA |
| | | GGCCUUUGCCGAGCCAUUCUACAAGUAUGAUAAGGCCGGCAACAGAACCCAGCAG |
| | | GUGAAGGCCGUGAGGGUGGAGCAGGUGCAGAAGACAGGCGUGUGGGUGCGCAACC |
| | | ACAAUGGCAUCGCCGACAAUGCUACCAUGGUGCGGGUGGACGUGUUUGAGAAGGG |
| | | CGAUAAGUACUAUCUGGUGCCCAUCUACAGCUGGCAGGUGGCCAAGGGCAUCCUG |
| | | CCUGAUAGAGCCGUGGUGCAGGGCAAGGACGAGGAGGAUUGGCAGCUGAUCGACG |
| | | AUUCCUUCAACUUUAAGUUCUCUCUGCACCCCAAUGACCUGGUGGAAGUGAUCAC |
| | | CAAGAAGGCCAGGAUGUUUGGCUACUUCGCCUCCUGCCACCGCGGCACAGGCAAC |
| | | AUCAAUAUCCGGAUCCACGACCUGGAUCACAAGAUCGGCAAGAACGGCAUCCUGG |
| | | AGGGCAUCGGCGUGAAGACAGCCCUGAGCUUCCAGAAGUAUCAGAUCGACGAGCU |
| | | GGGCAAGGAGAUCAGACCUUGUAGGCUGAAGAAGCGCCCACCCGUGCGGUCCGAG |
| | | UCCGCCACCCCCGAGUCCGUGUCCGGCUGGCGGCUGUUCAAGAAGAUCUCCUAGC |
| | | UAGCACCAGCCUCAAGAACACCCGAAUGGAGUCUCUAAGCUACAUAAUACCAACU |
| | | UACACUUUACAAAAUGUUGUCCCCCAAAAUGUAGCCAUUCGUAUCUGCUCCUAAU |
| | | AAAAAGAAAGUUUCUUCACAUUCUAAAAAAAAAAAAUGGAAAAAAAAAAAACGGA |
| | | AAAAAAAAAAAGGUAAAAAAAAAAAAUAUAAAAAAAAAAAACAUAAAAAAAAAAA |
| | | ACGAAAAAAAAAAAACGUAAAAAAAAAAAACUCAAAAAAAAAAAAGAUAAAAAAA |
| | | AAAAACCUAAAAAAAAAAAAUGUAAAAAAAAAAAAGGGAAAAAAAAAAAACGCAA |
| | | AAAAAAAAAACACAAAAAAAAAAAAUGCAAAAAAAAAAAAUCGAAAAAAAAAAAA |
| | | UCUAAAAAAAAAAAACGAAAAAAAAAAAACCCAAAAAAAAAAAAGACAAAAAAAA |
| | | AAAAUAGAAAAAAAAAAAAGUUAAAAAAAAAAAACUGAAAAAAAAAAAAUUUAAA |
| | | AAAAAAAAAUCUCGA |
| 705 | Exemplary | GGGAAGCUCAGAAUAAACGCUCAACUUUGGCCGGAUCUGCCACCAUGGACGGCUC |
| | sequence | CGGCGGCGGCUCCCCCAAGAAGAAGCGGAAGGUGGAGGACAAGCGGCCCGCCGCC |
| | encoding | ACCAAGAAGGCCGGCCAGGCCAAGAAGAAGAAGGGCGGCUCCGGCGGCGGCGCCG |
| | Nme1Cas9 with | CCUUCAAGCCCAACUCCAUCAACUACAUCCUGGGCCUGGACAUCGGCAUCGCCUC |
| | HiBiT tag | CGUGGGCUGGGCCAUGGUGGAGAUCGACGAGGAGGAGAACCCCAUCCGGCUGAUC |
| | (mRNA Y) | GACCUGGGCGUGCGGGUGUUCGAGCGGGCCGAGGUGCCCAAGACCGGCGACUCCC |
| | | UGGCCAUGGCCCGGCGGCUGGCCCGGUCCGUGCGGCGGCUGACCCGGCGGCGGGC |
| | | CCACCGGCUGCUGCGGACCCGGCGGCUGCUGAAGCGGGAGGGCGUGCUGCAGGCC |
| | | GCCAACUUCGACGAGAACGGCCUGAUCAAGUCCCUGCCCAACACCCCCUGGCAGC |
| | | UGCGGGCCGCCGCCCUGGACCGGAAGCUGACCCCCCUGGAGUGGUCCGCCGUGCU |
| | | GCUGCACCUGAUCAAGCACCGGGGCUACCUGUCCCAGCGGAAGAACGAGGGCGAG |
| | | ACCGCCGACAAGGAGCUGGGCGCCCUGCUGAAGGGCGUGGCCGGCAACGCCCACG |
| | | CCCUGCAGACCGGCGACUUCCGGACCCCCGCCGAGCUGGCCCUGAACAAGUUCGA |
| | | GAAGGAGUCCGGCCACAUCCGGAACCAGCGGUCCGACUACUCCCACACCUUCUCC |
| | | CGGAAGGACCUGCAGGCCGAGCUGAUCCUGCUGUUCGAGAAGCAGAAGGAGUUCG |
| | | GCAACCCCCACGUGUCCGGCGGCCUGAAGGAGGGCAUCGAGACCCUGCUGAUGAC |
| | | CCAGCGGCCCGCCCUGUCCGGCGACGCCGUGCAGAAGAUGCUGGGCCACUGCACC |
| | | UUCGAGCCCGCCGAGCCCAAGGCCGCCAAGAACACCUACACCGCCGAGCGGUUCA |
| | | UCUGGCUGACCAAGCUGAACAACCUGCGGAUCCUGGAGCAGGGCUCCGAGCGGCC |
| | | CCUGACCGACACCGAGCGGGCCACCCUGAUGGACGAGCCCUACCGGAAGUCCAAG |
| | | CUGACCUACGCCCAGGCCCGGAAGCUGCUGGGCCUGGAGGACACCGCCUUCUUCA |
| | | AGGGCCUGCGGUACGGCAAGGACAACGCCGAGGCCUCCACCCUGAUGGAGAUGAA |
| | | GGCCUACCACGCCAUCUCCCGGGCCCUGGAGAAGGAGGGCCUGAAGGACAAGAAG |
| | | UCCCCCCUGAACCUGUCCCCCGAGCUGCAGGACGAGAUCGGCACCGCCUUCUCCC |
| | | UGUUCAAGACCGACGAGGACAUCACCGGCCGGCUGAAGGACCGGAUCCAGCCCGA |
| | | GAUCCUGGAGGCCCUGCUGAAGCACAUCUCCUUCGACAAGUUCGUGCAGAUCUCC |
| | | CUGAAGGCCCUGCGGCGGAUCGUGCCCCUGAUGGAGCAGGGCAAGCGGUACGACG |
| | | AGGCCUGCGCCGAGAUCUACGGCGACCACUACGGCAAGAAGAACACCGAGGAGAA |
| | | GAUCUACCUGCCCCCCAUCCCCGCCGACGAGAUCCGGAACCCCGUGGUGCUGCGG |
| | | GCCCUGUCCCAGGCCCGGAAGGUGAUCAACGGCGUGGUGCGGCGGUACGGCUCCC |
| | | CCGCCCGGAUCCACAUCGAGACCGCCCGGGAGGUGGGCAAGUCCUUCAAGGACCG |
| | | GAAGGAGAUCGAGAAGCGGCAGGAGGAGAACCGGAAGGACCGGGAGAAGGCCGCC |
| | | GCCAAGUUCCGGGAGUACUUCCCCAACUUCGUGGGCGAGCCCAAGUCCAAGGACA |
| | | UCCUGAAGCUGCGGCUGUACGAGCAGCAGCACGGCAAGUGCCUGUACUCCGGCAA |
| | | GGAGAUCAACCUGGGCCGGCUGAACGAGAAGGGCUACGUGGAGAUCGACCACGCC |
| | | CUGCCCUUCUCCCGGACCUGGGACGACUCCUUCAACAACAAGGUGCUGGUGCUGG |
| | | GCUCCGAGAACCAGAACAAGGGCAACCAGACCCCCUACGAGUACUUCAACGGCAA |
| | | GGACAACUCCCGGGAGUGGCAGGAGUUCAAGGCCCGGGUGGAGACCUCCCGGUUC |
| | | CCCCGGUCCAAGAAGCAGCGGAUCCUGCUGCAGAAGUUCGACGAGGACGGCUUCA |
| | | AGGAGCGGAACCUGAACGACACCCGGUACGUGAACCGGUUCCUGUGCCAGUUCGU |
| | | GGCCGACCGGAUGCGGCUGACCGGCAAGGGCAAGAAGCGGGUGUUCGCCUCCAAC |
| | | GGCCAGAUCACCAACCUGCUGCGGGGCUUCUGGGGCCUGCGGAAGGUGCGGGCCG |
| | | AGAACGACCGGCACCACGCCCUGGACGCCGUGGUGGUGGCCUGCUCCACCGUGGC |
| | | CAUGCAGCAGAAGAUCACCCGGUUCGUGCGGUACAAGGAGAUGAACGCCUUCGAC |
| | | GGCAAGACCAUCGACAAGGAGACCGGCGAGGUGCUGCACCAGAAGACCCACUUCC |
| | | CCCAGCCCUGGGAGUUCUUCGCCCAGGAGGUGAUGAUCCGGGUGUUCGGCAAGCC |
| | | CGACGGCAAGCCCGAGUUCGAGGAGGCCGACACCCUGGAGAAGCUGCGGACCCUG |
| | | CUGGCCGAGAAGCUGUCCUCCCGGCCCGAGGCCGUGCACGAGUACGUGACCCCCC |
| | | UGUUCGUGUCCCGGGCCCCCAACCGGAAGAUGUCCGGCCAGGGCCACAUGGAGAC |
| | | CGUGAAGUCCGCCAAGCGGCUGGACGAGGGCGUGUCCGUGCUGCGGGUGCCCCUG |
| | | ACCCAGCUGAAGCUGAAGGACCUGGAGAAGAUGGUGAACCGGGAGCGGGAGCCCA |
| | | AGCUGUACGAGGCCCUGAAGGCCCGGCUGGAGGCCCACAAGGACGACCCCGCCAA |
| | | GGCCUUCGCCGAGCCCUUCUACAAGUACGACAAGGCCGGCAACCGGACCCAGCAG |
| | | GUGAAGGCCGUGCGGGUGGAGCAGGUGCAGAAGACCGGCGUGUGGGUGCGGAACC |
| | | ACAACGGCAUCGCCGACAACGCCACCAUGGUGCGGGUGGACGUGUUCGAGAAGGG |
| | | CGACAAGUACUACCUGGUGCCCAUCUACUCCUGGCAGGUGGCCAAGGGCAUCCUG |
| | | CCCGACCGGGCCGUGGUGCAGGGCAAGGACGAGGAGGACUGGCAGCUGAUCGACG |
| | | ACUCCUUCAACUUCAAGUUCUCCCUGCACCCCAACGACCUGGUGGAGGUGAUCAC |
| | | CAAGAAGGCCCGGAUGUUCGGCUACUUCGCCUCCUGCCACCGGGGCACCGGCAAC |
| | | AUCAACAUCCGGAUCCACGACCUGGACCACAAGAUCGGCAAGAACGGCAUCCUGG |
| | | AGGGCAUCGGCGUGAAGACCGCCCUGUCCUUCCAGAAGUACCAGAUCGACGAGCU |
| | | GGGCAAGGAGAUCCGGCCCUGCCGGCUGAAGAAGCGGCCCCCCGUGCGGUCCGAG |
| | | UCCGCCACCCCCGAGUCCGUGUCCGGCUGGCGGCUGUUCAAGAAGAUCUCCUAGC |
| | | UAGCACCAGCCUCAAGAACACCCGAAUGGAGUCUCUAAGCUACAUAAUACCAACU |
| | | UACACUUUACAAAAUGUUGUCCCCCAAAAUGUAGCCAUUCGUAUCUGCUCCUAAU |
| | | AAAAAGAAAGUUUCUUCACAUUCUAAAAAAAAAAAAUGGAAAAAAAAAAAACGGA |
| | | AAAAAAAAAAAGGUAAAAAAAAAAAAUAUAAAAAAAAAAAACAUAAAAAAAAAAA |
| | | ACGAAAAAAAAAAAACGUAAAAAAAAAAAACUCAAAAAAAAAAAAGAUAAAAAAA |
| | | AAAAACCUAAAAAAAAAAAAUGUAAAAAAAAAAAAGGGAAAAAAAAAAAACGCAA |
| | | AAAAAAAAAACACAAAAAAAAAAAAUGCAAAAAAAAAAAAUCGAAAAAAAAAAAA |
| | | UCUAAAAAAAAAAAACGAAAAAAAAAAAACCCAAAAAAAAAAAAGACAAAAAAAA |
| | | AAAAUAGAAAAAAAAAAAAGUUAAAAAAAAAAAACUGAAAAAAAAAAAAUUUAAA |
| | | AAAAAAAAAUCUCGA |
| 706 | Exemplary | GGGAAGCUCAGAAUAAACGCUCAACUUUGGCCGGAUCUGCCACCAUGGACGGCUC |
| | sequence | CGGCGGCGGCUCCCCCAAGAAGAAGCGGAAGGUGGAGGACAAGCGGCCCGCCGCC |
| | encoding | ACCAAGAAGGCCGGCCAGGCCAAGAAGAAGAAGGGCGGCUCCGGCGGCGCCGCCU |
| | Nme3Cas9 | UCAAGCCCAACCCCAUCAACUACAUCCUGGGCCUGGACAUCGGCAUCGCCUCCGU |
| | with | GGGCUGGGCCAUGGUGGAGAUCGACGAGGAGGAGAACCCCAUCCGGCUGAUCGAC |
| | HiBiT tag | CUGGGCGUGQGGGUGUUCGAGCGGGCCGAGGUGCCCAAGACCGGCGACUCCCUGG |
| | (mRNA Z) | CCAUGGCCCGGCGGCUGGCCCGGUCCGUGCGGCGGCUGACCCGGCGGCGGGCCCA |
| | | CCGGCUGCUGCGGGCCCGGCGGCUGCUGAAGCGGGAGGGCGUGCUGCAGGCCGCC |
| | | GACUUCGACGAGAACGGCCUGAUCAAGUCCCUGCCCAACACCCCCUGGCAGCUGC |
| | | GGGCCGCCGCCCUGGACCGGAAGCUGACCCCCCUGGAGUGGUCCGCCGUGCUGCU |
| | | GCACCUGAUCAAGCACCGGGGCUACCUGUCCCAGCGGAAGAACGAGGGCGAGACC |
| | | GCCGACAAGGAGCUGGGCGCCCUGCUGAAGGGCGUGGCCGACAACGCCCACGCCC |
| | | UGCAGACCGGCGACUUCCGGACCCCCGCCGAGCUGGCCCUGAACAAGUUCGAGAA |
| | | GGAGUGCGGCCACAUCCGGAACCAGCGGGGCGACUACUCCCACACCUUCUCCCGG |
| | | AAGGACCUGCAGGCCGAGCUGAACCUGCUGUUCGAGAAGCAGAAGGAGUUCGGCA |
| | | ACCCCCACGUGUCCGGCGGCCUGAAGGAGGGCAUCGAGACCCUGCUGAUGACCCA |
| | | GCGGCCCGCCCUGUCCGGCGACGCCGUGCAGAAGAUGCUGGGCCACUGCACCUUC |
| | | GAGCCCGCCGAGCCCAAGGCCGCCAAGAACACCUACACCGCCGAGCGGUUCAUCU |
| | | GGCUGACCAAGCUGAACAACCUGCGGAUCCUGGAGCAGGGCUCCGAGCGGCCCCU |
| | | GACCGACACCGAGCGGGCCACCCUGAUGGACGAGCCCUACCGGAAGUCCAAGCUG |
| | | ACCUACGCCCAGGCCCGGAAGCUGCUGUCCCUGGAGGACACCGCCUUCUUCAAGG |
| | | GCCUGCGGUACGGCAAGGACAACGCCGAGGCCUCCACCCUGAUGGAGAUGAAGGC |
| | | CUACCACACCAUCUCCCGGGCCCUGGAGAAGGAGGGCCUGAAGGACAAGAAGUCC |
| | | CCCCUGAACCUGUCCCCCGAGCUGCAGGACGAGAUCGGCACCGCCUUCUCCCUGU |
| | | UCAAGACCGACGAGGACAUCACCGGCCGGCUGAAGGACCGGAUCCAGCCCGAGAU |
| | | CCUGGAGGCCCUGCUGAAGCACAUCUCCUUCGACAAGUUCGUGCAGAUCUCCCUG |
| | | AAGGCCCUGCGGCGGAUCGUGCCCCUGAUGGAGCAGGGCAAGCGGUACGACGAGG |
| | | CCUGCGCCGAGAUCUACGGCGACCACUACGGCAAGAAGAACACCGAGGAGAAGAU |
| | | CUACCUGCCCCCCAUCCCCGCCGACGAGAUCCGGAACCCCGUGGUGCUGCGGGCC |
| | | CUGUCCCAGGCCCGGAAGGUGAUCAACGGCGUGGUGCGGCGGUACGGCUCCCCCG |
| | | CCCGGAUCCACAUCGAGACCGCCCGGGAGGUGGGCAAGUCCUUCAAGGACCGGAA |
| | | GGAGAUCGAGAAGCGGCAGGAGGAGAACCGGAAGGACCGGGAGAAGGCCGCCGCC |
| | | AAGUUCCGGGAGUACUUCCCCAACUUCGUGGGCGAGCCCAAGUCCAAGGACAUCC |
| | | UGAAGCUGCGGCUGUACGAGCAGCAGCACGGCAAGUGCCUGUACUCCGGCAAGGA |
| | | GAUCAACCUGGGCCGGCUGAACGAGAAGGGCUACGUGGAGAUCGACCACGCCCUG |
| | | CCCUUCUCCCGGACCUGGGACGACUCCUUCAACAACAAGGUGCUGGUGCUGGGCU |
| | | CCGAGAACCAGAACAAGGGCAACCAGACCCCCUACGAGUACUUCAACGGCAAGGA |
| | | CAACUCCCGGGAGUGGCAGGAGUUCAAGGCCCGGGUGGAGACCUCCCGGUUCCCC |
| | | CGGUCCAAGAAGCAGCGGAUCCUGCUGCAGAAGUUCGACGAGGACGGCUUCAAGG |
| | | AGCGGAACCUGAACGACACCCGGUACGUGAACCGGUUCCUGUGCCAGUUCGUGGC |
| | | CGACCGGAUGCGGCUGACCGGCAAGGGCAAGAAGCGGGUGUUCGCCUCCAACGGC |
| | | CAGAUCACCAACCUGCUGCGGGGCUUCUGGGGCCUGCGGAAGGUGCGGGCCGAGA |
| | | ACGACCGGCACCACGCCCUGGACGCCGUGGUGGUGGCCUGCUCCACCGUGGCCAU |
| | | GCAGCAGAAGAUCACCCGGUUCGUGCGGUACAAGGAGAUGAACGCCUUCGACGGC |
| | | AAGACCAUCGACAAGGAGACCGGCGAGGUGCUGCACCAGAAGACCCACUUCCCCC |
| | | AGCCCUGGGAGUUCUUCGCCCAGGAGGUGAUGAUCCGGGUGUUCGGCAAGCCCGA |
| | | CGGCAAGCCCGAGUUCGAGGAGGCCGACACCCCCGAGAAGCUGCGGACCCUGCUG |
| | | GCCGAGAAGCUGUCCUCCCGGCCCGAGGCCGUGCACGAGUACGUGACCCCCCUGU |
| | | UCGUGUCCCGGGCCCCCAACCGGAAGAUGUCCGGCCAGGGCCACAUGGAGACCGU |
| | | GAAGUCCGCCAAGCGGCUGGACGAGGGCGUGUCCGUGCUGCGGGUGCCCCUGACC |
| | | CAGCUGAAGCUGAAGGACCUGGAGAAGAUGGUGAACCGGGAGCGGGAGCCCAAGC |
| | | UGUACGAGGCCCUGAAGGCCCGGCUGGAGGCCCACAAGGACGACCCCGCCAAGGC |
| | | CUUCGCCGAGCCCUUCUACAAGUACGACAAGGCCGGCAACCGGACCCAGCAGGUG |
| | | AAGGCCGUGCGGGUGGAGCAGGUGCAGAAGACCGGCGUGUGGGUGCGGAACCACA |
| | | ACGGCAUCGCCGACAACGCCACCAUGGUGCGGGUGGACGUGUUCGAGAAGGGCGA |
| | | CAAGUACUACCUGGUGCCCAUCUACUCCUGGCAGGUGGCCAAGGGCAUCCUGCCC |
| | | GACCGGGCCGUGGUGGCCUACGCCGACGAGGAGGACUGGACCGUGAUCGACGAGU |
| | | CCUUCCGGUUCAAGUUCGUGCUGUACUCCAACGACCUGAUCAAGGUGCAGCUGAA |
| | | GAAGGACUCCUUCCUGGGCUACUUCUCCGGCCUGGACCGGGCCACCGGCGCCAUC |
| | | UCCCUGCGGGAGCACGACCUGGAGAAGUCCAAGGGCAAGGACGGCAUGCACCGGA |
| | | UCGGCGUGAAGACCGCCCUGUCCUUCCAGAAGUACCAGAUCGACGAGAUGGGCAA |
| | | GGAGAUCCGGCCCUGCCGGCUGAAGAAGCGGCCCCCCGUGCGGUCCGAGUCCGCC |
| | | ACCCCCGAGUCCGUGUCCGGCUGGCGGCUGUUCAAGAAGAUCUCCUAGCUAGCAC |
| | | CAGCCUCAAGAACACCCGAAUGGAGUCUCUAAGCUACAUAAUACCAACUUACACU |
| | | UUACAAAAUGUUGUCCCCCAAAAUGUAGCCAUUCGUAUCUGCUCCUAAUAAAAAG |
| | | AAAGUUUCUUCACAUUCUCUCGAGAAAAAAAAAAAAUGGAAAAAAAAAAAACGGA |
| | | AAAAAAAAAAAGGTAAAAAAAAAAAAUAUAAAAAAAAAAAACAUAAAAAAAAAAA |
| | | ACGAAAAAAAAAAAACGUAAAAAAAAAAAACUCAAAAAAAAAAAAGAUAAAAAAA |
| | | AAAAACCUAAAAAAAAAAAAUGUAAAAAAAAAAAAGGGAAAAAAAAAAAACGCAA |
| | | AAAAAAAAAACACAAAAAAAAAAAAUGCAAAAAAAAAAAAUCGAAAAAAAAAAAA |
| | | UCUAAAAAAAAAAAACGAAAAAAAAAAAACCCAAAAAAAAAAAAGACAAAAAAAA |
| | | AAAAUAGAAAAAAAAAAAAGUUAAAAAAAAAAAACUGAAAAAAAAAAAAUUUAAA |
| | | AAAAAAAAAUCUAG |
| 707 | Exemplary amino | MDGSGGGSPKKKRKVEDKRPAATKKAGQAKKKKGGSGGGAAFKPNPINYILGLDI |
| | acid sequence | GIASVGWAMVEIDEEENPIRLIDLGVRVFERAEVPKTGDSLAMARRLARSVRRLT |
| | for Nme2Cas9 | RRRAHRLLRARRLLKREGVLQAADEDENGLIKSLPNTPWQLRAAALDRKLTPLEW |
| | (mRNA AA amino | SAVLLHLIKHRGYLSQRKNEGETADKELGALLKGVANNAHALQTGDFRTPAELAL |
| | acid) | NKFEKESGHIRNQRGDYSHTFSRKDLQAELILLFEKQKEFGNPHVSGGLKEGIET |
| | | LLMTQRPALSGDAVQKMLGHCTFEPAEPKAAKNTYTAERFIWLTKLNNLRILEQG |
| | | SERPLTDTERATLMDEPYRKSKLTYAQARKLLGLEDTAFFKGLRYGKDNAEASTL |
| | | MEMKAYHAISRALEKEGLKDKKSPLNLSSELQDEIGTAFSLEKTDEDITGRLKDR |
| | | VQPEILEALLKHISFDKFVQISLKALRRIVPLMEQGKRYDEACAEIYGDHYGKKN |
| | | TEEKIYLPPIPADEIRNPVVLRALSQARKVINGVVRRYGSPARIHIETAREVGKS |
| | | FKDRKEIEKRQEENRKDREKAAAKFREYFPNFVGEPKSKDILKLRLYEQQHGKCL |
| | | YSGKEINLVRLNEKGYVEIDHALPFSRTWDDSFNNKVLVLGSENQNKGNQTPYEY |
| | | ENGKDNSREWQEFKARVETSRFPRSKKQRILLQKFDEDGEKECNLNDTRYVNRFL |
| | | CQFVADHILLTGKGKRRVFASNGQITNLLRGFWGLRKVRAENDRHHALDAVVVAC |
| | | STVAMQQKITRFVRYKEMNAFDGKTIDKETGKVLHQKTHFPQPWEFFAQEVMIRV |
| | | FGKPDGKPEFEEADTPEKLRTLLAEKLSSRPEAVHEYVTPLFVSRAPNRKMSGAH |
| | | KDTLRSAKRFVKHNEKISVKRVWLTEIKLADLENMVNYKNGREIELYEALKARLE |
| | | AYGGNAKQAFDPKDNPFYKKGGQLVKAVRVEKTQESGVLLNKKNAYTIADNGDMV |
| | | RVDVFCKVDKKGKNQYFIVPIYAWQVAENILPDIDCKGYRIDDSYTFCFSLHKYD |
| | | LIAFQKDEKSKVEFAYYINCDSSNGRFYLAWHDKGSKEQQFRISTQNLVLIQKYQ |
| | | VNELGKEIRPCRLKKRPPVR* |
| 708 | Exemplary amino | MAAFKPNSINYILGLDIGIASVGWAMVEIDEEENPIRLIDLGVRVFERAEVPKTG |
| | acid sequence | DSLAMARRLARSVRRLTRRRAHRLLRTRRLLKREGVLQAANFDENGLIKSLPNTP |
| | for Nme1Cas9 | WQLRAAALDRKLTPLEWSAVLLHLIKHRGYLSQRKNEGETADKELGALLKGVAGN |
| | (mRNA BB amino | AHALQTGDFRTPAELALNKFEKESGHIRNQRSDYSHTFSRKDLQAELILLFEKQK |
| | acid) | EFGNPHVSGGLKEGIETLLMTQRPALSGDAVQKMLGHCTFEPAEPKAAKNTYTAE |
| | | RFIWLTKLNNLRILEQGSERPLTDTERATLMDEPYRKSKLTYAQARKLLGLEDTA |
| | | FFKGLRYGKDNAEASTLMEMKAYHAISRALEKEGLKDKKSPLNLSPELQDEIGTA |
| | | FSLEKTDEDITGRLKDRIQPEILEALLKHISFDKFVQISLKALRRIVPLMEQGKR |
| | | YDEACAEIYGDHYGKKNTEEKIYLPPIPADEIRNPVVLRALSQARKVINGVVRRY |
| | | GSPARIHIETAREVGKSFKDRKEIEKRQEENRKDREKAAAKFREYFPNFVGEPKS |
| | | KDILKLRLYEQQHGKCLYSGKEINLGRLNEKGYVEIDHALPFSRTWDDSENNKVL |
| | | VLGSENQNKGNQTPYEYENGKDNSREWQEFKARVETSRFPRSKKQRILLQKFDED |
| | | GEKERNLNDTRYVNRFLCQFVADRMRLTGKGKKRVFASNGQITNLLRGFWGLRKV |
| | | RAENDRHHALDAVVVACSTVAMQQKITRFVRYKEMNAFDGKTIDKETGEVLHQKT |
| | | HFPQPWEFFAQEVMIRVFGKPDGKPEFEEADTLEKLRTLLAEKLSSRPEAVHEYV |
| | | TPLFVSRAPNRKMSGQGHMETVKSAKRLDEGVSVLRVPLTQLKLKDLEKMVNRER |
| | | EPKLYEALKARLEAHKDDPAKAFAEPFYKYDKAGNRTQQVKAVRVEQVQKTGVWV |
| | | RNHNGIADNATMVRVDVFEKGDKYYLVPIYSWQVAKGILPDRAVVQGKDEEDWQL |
| | | IDDSENEKFSLHPNDLVEVITKKARMFGYFASCHRGTGNINIRIHDLDHKIGKNG |
| | | ILEGIGVKTALSFQKYQIDELGKEIRPCRLKKRPPVRSGKRTADGSEFESPKKKR |
| | | KVE* |
| 709 | Exemplary amino | MDGSGGGSPKKKRKVEDKRPAATKKAGQAKKKKGGSGGGAAFKPNPINYILGLDI |
| | acid sequence | GIASVGWAMVEIDEEENPIRLIDLGVRVFERAEVPKTGDSLAMARRLARSVRRLT |
| | for Nme2Cas9 | RRRAHRLLRARRLLKREGVLQAADEDENGLIKSLPNTPWQLRAAALDRKLTPLEW |
| | with HiBiT tag | SAVLLHLIKHRGYLSQRKNEGETADKELGALLKGVANNAHALQTGDERTPAELAL |
| | (mRNA V amino | NKFEKESGHIRNQRGDYSHTFSRKDLQAELILLFEKQKEFGNPHVSGGLKEGIET |
| | acid) | LLMTQRPALSGDAVQKMLGHCTFEPAEPKAAKNTYTAERFIWLTKLNNLRILEQG |
| | | SERPLTDTERATLMDEPYRKSKLTYAQARKLLGLEDTAFFKGLRYGKDNAEASTL |
| | | MEMKAYHAISRALEKEGLKDKKSPLNLSSELQDEIGTAFSLFKTDEDITGRLKDR |
| | | VQPEILEALLKHISFDKFVQISLKALRRIVPLMEQGKRYDEACAEIYGDHYGKKN |
| | | TEEKIYLPPIPADEIRNPVVLRALSQARKVINGVVRRYGSPARIHIETAREVGKS |
| | | FKDRKEIEKRQEENRKDREKAAAKFREYFPNFVGEPKSKDILKLRLYEQQHGKCL |
| | | YSGKEINLVRLNEKGYVEIDHALPESRTWDDSENNKVLVLGSENQNKGNQTPYEY |
| | | ENGKDNSREWQEFKARVETSRFPRSKKQRILLQKFDEDGEKECNLNDTRYVNRFL |
| | | CQFVADHILLTGKGKRRVFASNGQITNLLRGFWGLRKVRAENDRHHALDAVVVAC |
| | | STVAMQQKITRFVRYKEMNAFDGKTIDKETGKVLHQKTHFPQPWEFFAQEVMIRV |
| | | FGKPDGKPEFEEADTPEKLRTLLAEKLSSRPEAVHEYVTPLFVSRAPNRKMSGAH |
| | | KDTLRSAKRFVKHNEKISVKRVWLTEIKLADLENMVNYKNGREIELYEALKARLE |
| | | AYGGNAKQAFDPKDNPFYKKGGQLVKAVRVEKTQESGVLLNKKNAYTIADNGDMV |
| | | RVDVFCKVDKKGKNQYFIVPIYAWQVAENILPDIDCKGYRIDDSYTFCFSLHKYD |
| | | LIAFQKDEKSKVEFAYYINCDSSNGRFYLAWHDKGSKEQQFRISTQNLVLIQKYQ |
| | | VNELGKEIRPCRLKKRPPVRSESATPESVSGWRLFKKIS* |
| 710 | Exemplary amino | MDGSGGGSPKKKRKVEDKRPAATKKAGQAKKKKGGSGGGAAFKPNSINYILGLDI |
| | acid sequence | GIASVGWAMVEIDEEENPIRLIDLGVRVFERAEVPKTGDSLAMARRLARSVRRLT |
| | for Nme1Cas9 | RRRAHRLLRTRRLLKREGVLQAANEDENGLIKSLPNTPWQLRAAALDRKLTPLEW |
| | with HiBiT tag | SAVLLHLIKHRGYLSQRKNEGETADKELGALLKGVAGNAHALQTGDERTPAELAL |
| | (mRNA X amino | NKFEKESGHIRNQRSDYSHTFSRKDLQAELILLFEKQKEFGNPHVSGGLKEGIET |
| | acid) | LLMTQRPALSGDAVQKMLGHCTFEPAEPKAAKNTYTAERFIWLTKLNNLRILEQG |
| | | SERPLTDTERATLMDEPYRKSKLTYAQARKLLGLEDTAFFKGLRYGKDNAEASTL |
| | | MEMKAYHAISRALEKEGLKDKKSPLNLSPELQDEIGTAFSLFKTDEDITGRLKDR |
| | | IQPEILEALLKHISFDKFVQISLKALRRIVPLMEQGKRYDEACAEIYGDHYGKKN |
| | | TEEKIYLPPIPADEIRNPVVLRALSQARKVINGVVRRYGSPARIHIETAREVGKS |
| | | FKDRKEIEKRQEENRKDREKAAAKFREYFPNFVGEPKSKDILKLRLYEQQHGKCL |
| | | YSGKEINLGRLNEKGYVEIDHALPFSRTWDDSFNNKVLVLGSENQNKGNQTPYEY |
| | | ENGKDNSREWQEFKARVETSRFPRSKKQRILLQKFDEDGEKERNLNDTRYVNRFL |
| | | CQFVADRMRLTGKGKKRVFASNGQITNLLRGFWGLRKVRAENDRHHALDAVVVAC |
| | | STVAMQQKITRFVRYKEMNAFDGKTIDKETGEVLHQKTHFPQPWEFFAQEVMIRV |
| | | FGKPDGKPEFEEADTLEKLRTLLAEKLSSRPEAVHEYVTPLFVSRAPNRKMSGQG |
| | | HMETVKSAKRLDEGVSVLRVPLTQLKLKDLEKMVNREREPKLYEALKARLEAHKD |
| | | DPAKAFAEPFYKYDKAGNRTQQVKAVRVEQVQKTGVWVRNHNGIADNATMVRVDV |
| | | FEKGDKYYLVPIYSWQVAKGILPDRAVVQGKDEEDWQLIDDSFNFKESLHPNDLV |
| | | EVITKKARMFGYFASCHRGTGNINIRIHDLDHKIGKNGILEGIGVKTALSFQKYQ |
| | | IDELGKEIRPCRLKKRPPVRSESATPESVSGWRLFKKIS* |
| 711 | Exemplary amino | MDGSGGGSPKKKRKVEDKRPAATKKAGQAKKKKGGSGGGAAFKPNSINYILGLDI |
| | acid sequence | GIASVGWAMVEIDEEENPIRLIDLGVRVFERAEVPKTGDSLAMARRLARSVRRLT |
| | for Nme1Cas9 | RRRAHRLLRTRRLLKREGVLQAANEDENGLIKSLPNTPWQLRAAALDRKLTPLEW |
| | with HiBiT tag | SAVLLHLIKHRGYLSQRKNEGETADKELGALLKGVAGNAHALQTGDERTPAELAL |
| | (mRNA Y amino | NKFEKESGHIRNQRSDYSHTFSRKDLQAELILLFEKQKEFGNPHVSGGLKEGIET |
| | acid) | LLMTQRPALSGDAVQKMLGHCTFEPAEPKAAKNTYTAERFIWLTKLNNLRILEQG |
| | | SERPLTDTERATLMDEPYRKSKLTYAQARKLLGLEDTAFFKGLRYGKDNAEASTL |
| | | MEMKAYHAISRALEKEGLKDKKSPLNLSPELQDEIGTAFSLFKTDEDITGRLKDR |
| | | IQPEILEALLKHISFDKFVQISLKALRRIVPLMEQGKRYDEACAEIYGDHYGKKN |
| | | TEEKIYLPPIPADEIRNPVVLRALSQARKVINGVVRRYGSPARIHIETAREVGKS |
| | | FKDRKEIEKRQEENRKDREKAAAKFREYFPNFVGEPKSKDILKLRLYEQQHGKCL |
| | | YSGKEINLGRLNEKGYVEIDHALPESRTWDDSENNKVLVLGSENQNKGNQTPYEY |
| | | ENGKDNSREWQEFKARVETSRFPRSKKQRILLQKFDEDGEKERNLNDTRYVNRFL |
| | | CQFVADRMRLTGKGKKRVFASNGQITNLLRGFWGLRKVRAENDRHHALDAVVVAC |
| | | STVAMQQKITRFVRYKEMNAFDGKTIDKETGEVLHQKTHFPQPWEFFAQEVMIRV |
| | | FGKPDGKPEFEEADTLEKLRTLLAEKLSSRPEAVHEYVTPLFVSRAPNRKMSGQG |
| | | HMETVKSAKRLDEGVSVLRVPLTQLKLKDLEKMVNREREPKLYEALKARLEAHKD |
| | | DPAKAFAEPFYKYDKAGNRTQQVKAVRVEQVQKTGVWVRNHNGIADNATMVRVDV |
| | | FEKGDKYYLVPIYSWQVAKGILPDRAVVQGKDEEDWQLIDDSFNFKFSLHPNDLV |
| | | EVITKKARMFGYFASCHRGTGNINIRIHDLDHKIGKNGILEGIGVKTALSFQKYQ |
| | | IDELGKEIRPCRLKKRPPVRSESATPESVSGWRLFKKIS* |
| 712 | Exemplary amino | MDGSGGGSPKKKRKVEDKRPAATKKAGQAKKKKGGSGGAAFKPNPINYILGLDIG |
| | acid sequence | IASVGWAMVEIDEEENPIRLIDLGVRVFERAEVPKTGDSLAMARRLARSVRRLTR |
| | for Nme3Cas9 | RRAHRLLRARRLLKREGVLQAADFDENGLIKSLPNTPWQLRAAALDRKLTPLEWS |
| | with HiBiT tag | AVLLHLIKHRGYLSQRKNEGETADKELGALLKGVADNAHALQTGDFRTPAELALN |
| | (mRNA Z amino | KFEKECGHIRNQRGDYSHTFSRKDLQAELNLLFEKQKEFGNPHVSGGLKEGIETL |
| | acid) | LMTQRPALSGDAVQKMLGHCTFEPAEPKAAKNTYTAERFIWLTKLNNLRILEQGS |
| | | ERPLTDTERATLMDEPYRKSKLTYAQARKLLSLEDTAFFKGLRYGKDNAEASTLM |
| | | EMKAYHTISRALEKEGLKDKKSPLNLSPELQDEIGTAFSLFKTDEDITGRLKDRI |
| | | QPEILEALLKHISFDKFVQISLKALRRIVPLMEQGKRYDEACAEIYGDHYGKKNT |
| | | EEKIYLPPIPADEIRNPVVLRALSQARKVINGVVRRYGSPARIHIETAREVGKSF |
| | | KDRKEIEKRQEENRKDREKAAAKFREYFPNFVGEPKSKDILKLRLYEQQHGKCLY |
| | | SGKEINLGRLNEKGYVEIDHALPFSRTWDDSENNKVLVLGSENQNKGNQTPYEYE |
| | | NGKDNSREWQEFKARVETSRFPRSKKQRILLQKFDEDGEKERNLNDTRYVNRFLC |
| | | QFVADRMRLTGKGKKRVFASNGQITNLLRGFWGLRKVRAENDRHHALDAVVVACS |
| | | TVAMQQKITRFVRYKEMNAFDGKTIDKETGEVLHQKTHFPQPWEFFAQEVMIRVF |
| | | GKPDGKPEFEEADTPEKLRTLLAEKLSSRPEAVHEYVTPLFVSRAPNRKMSGQGH |
| | | METVKSAKRLDEGVSVLRVPLTQLKLKDLEKMVNREREPKLYEALKARLEAHKDD |
| | | PAKAFAEPFYKYDKAGNRTQQVKAVRVEQVQKTGVWVRNHNGIADNATMVRVDVF |
| | | EKGDKYYLVPIYSWQVAKGILPDRAVVAYADEEDWTVIDESFRFKFVLYSNDLIK |
| | | VQLKKDSFLGYESGLDRATGAISLREHDLEKSKGKDGMHRIGVKTALSFQKYQID |
| | | EMGKEIRPCRLKKRPPVRSESATPESVSGWRLFKKIS* |
| 713 | Exemplary open | augGACGGCUCCGGCGGCGGCUCCCCCAAGAAGAAGCGGAAGGUGGAGGACAAGC |
| | reading frame | GGCCCGCCGCCACCAAGAAGGCCGGCCAGGCCAAGAAGAAGAAGGGCGGCUCCGG |
| | for Nme2Cas9 | CGGCGGCgccgccuucaagcccaaccccaucaacuacauccugggccuggacauc |
| | (mRNA AA ORF) | ggcaucgccuccgugggcugggccaugguggagaucgacgaggaggagaacccca |
| | | uccggcugaucgaccugggcgugcggguguucgagcgggccgaggugcccaagac |
| | | cggcgacucccuggccauggcccggcggcuggcccgguccgugcggcggcugacc |
| | | cggcggcgggcccaccggcugcugcgggcccggcggcugcugaagcgggagggcg |
| | | ugcugcaggccgccgacuucgacgagaacggccugaucaagucccugcccaacac |
| | | ccccuggcagcugcgggccgccgcccuggaccggaagcugaccccccuggagugg |
| | | uccgccgugcugcugcaccugaucaagcaccggggcuaccugucccagcggaaga |
| | | acgagggcgagaccgccgacaaggagcugggcgcccugcugaagggcguggccaa |
| | | caacgcccacgcccugcagaccggcgacuuccggacccccgccgagcuggcccug |
| | | aacaaguucgagaaggaguccggccacauccggaaccagcggggcgacuacuccc |
| | | acaccuucucccggaaggaccugcaggccgagcugauccugcuguucgagaagca |
| | | gaaggaguucggcaacccccacguguccggcggccugaaggagggcaucgagacc |
| | | cugcugaugacccagcggcccgcccuguccggcgacgccgugcagaagaugcugg |
| | | gccacugcaccuucgagcccgccgagcccaaggccgccaagaacaccuacaccgc |
| | | cgagcgguucaucuggcugaccaagcugaacaaccugcggauccuggagcagggc |
| | | uccgagcggccccugaccgacaccgagcgggccacccugauggacgagcccuacc |
| | | ggaaguccaagcugaccuacgcccaggcccggaagcugcugggccuggaggacac |
| | | cgccuucuucaagggccugcgguacggcaaggacaacgccgaggccuccacccug |
| | | auggagaugaaggccuaccacgccaucucccgggcccuggagaaggagggccuga |
| | | aggacaagaaguccccccugaaccuguccuccgagcugcaggacgagaucggcac |
| | | cgccuucucccuguucaagaccgacgaggacaucaccggccggcugaaggaccgg |
| | | gugcagcccgagauccuggaggcccugcugaagcacaucuccuucgacaaguucg |
| | | ugcagaucucccugaaggcccugcggcggaucgugccccugauggagcagggcaa |
| | | gcgguacgacgaggccugcgccgagaucuacggcgaccacuacggcaagaagaac |
| | | accgaggagaagaucuaccugccccccauccccgccgacgagauccggaaccccg |
| | | uggugcugcgggcccugucccaggcccggaaggugaucaacggcguggugcggcg |
| | | guacggcucccccgcccggauccacaucgagaccgcccgggaggugggcaagucc |
| | | uucaaggaccggaaggagaucgagaagcggcaggaggagaaccggaaggaccggg |
| | | agaaggccgccgccaaguuccgggaguacuuccccaacuucgugggcgagcccaa |
| | | guccaaggacauccugaagcugcggcuguacgagcagcagcacggcaagugccug |
| | | uacuccggcaaggagaucaaccuggugcggcugaacgagaagggcuacguggaga |
| | | ucgaccacgcccugcccuucucccggaccugggacgacuccuucaacaacaaggu |
| | | gcuggugcugggcuccgagaaccagaacaagggcaaccagacccccuacgaguac |
| | | uucaacggcaaggacaacucccgggaguggcaggaguucaaggcccggguggaga |
| | | ccucccgguucccccgguccaagaagcagcggauccugcugcagaaguucgacga |
| | | ggacggcuucaaggagugcaaccugaacgacacccgguacgugaaccgguuccug |
| | | ugccaguucguggccgaccacauccugcugaccggcaagggcaagcggcgggugu |
| | | ucgccuccaacggccagaucaccaaccugcugcggggcuucuggggccugcggaa |
| | | ggugcgggccgagaacgaccggcaccacgcccuggacgccguggugguggccugc |
| | | uccaccguggccaugcagcagaagaucacccgguucgugcgguacaaggagauga |
| | | acgccuucgacggcaagaccaucgacaaggagaccggcaaggugcugcaccagaa |
| | | gacccacuucccccagcccugggaguucuucgcccaggaggugaugauccgggug |
| | | uucggcaagcccgacggcaagcccgaguucgaggaggccgacacccccgagaagc |
| | | ugcggacccugcuggccgagaagcuguccucccggcccgaggccgugcacgagua |
| | | cgugaccccccuguucgugucccgggcccccaaccggaagauguccggcgcccac |
| | | aaggacacccugcgguccgccaagcgguucgugaagcacaacgagaagaucuccg |
| | | ugaagcggguguggcugaccgagaucaagcuggccgaccuggagaacauggugaa |
| | | cuacaagaacggccgggagaucgagcuguacgaggcccugaaggcccggcuggag |
| | | gccuacggcggcaacgccaagcaggccuucgaccccaaggacaaccccuucuaca |
| | | agaagggcggccagcuggugaaggccgugcggguggagaagacccaggaguccgg |
| | | cgugcugcugaacaagaagaacgccuacaccaucgccgacaacggcgacauggug |
| | | cggguggacguguucugcaagguggacaagaagggcaagaaccaguacuucaucg |
| | | ugcccaucuacgccuggcagguggccgagaacauccugcccgacaucgacugcaa |
| | | gggcuaccggaucgacgacuccuacaccuucugcuucucccugcacaaguacgac |
| | | cugaucgccuuccagaaggacgagaaguccaagguggaguucgccuacuacauca |
| | | acugcgacuccuccaacggccgguucuaccuggccuggcacgacaagggcuccaa |
| | | ggagcagcaguuccggaucuccacccagaaccuggugcugauccagaaguaccag |
| | | gugaacgagcugggcaaggagauccggcccugccggcugaagaagcggccccccg |
| | | ugcgguag |
| 714 | Exemplary open | AUGGCAGCAUUCAAGCCGAACUCGAUCAACUACAUCCUGGGACUGGACAUCGGAA |
| | reading frame | UCGCAUCGGUCGGAUGGGCAAUGGUCGAAAUCGACGAAGAAGAAAACCCGAUCAG |
| | for Nme1Cas9 | ACUGAUCGACCUGGGAGUCAGAGUCUUCGAAAGAGCAGAAGUCCCGAAGACAGGA |
| | (mRNA AB ORF) | GACUCGCUGGCAAUGGCAAGAAGACUGGCAAGAUCGGUCAGAAGACUGACAAGAA |
| | | GAAGAGCACACAGACUGCUGAGAACAAGAAGACUGCUGAAGAGAGAAGGAGUCCU |
| | | GCAGGCAGCAAACUUCGACGAAAACGGACUGAUCAAGUCGCUGCCGAACACACCG |
| | | UGGCAGCUGAGAGCAGCAGCACUGGACAGAAAGCUGACACCGCUGGAAUGGUCGG |
| | | CAGUCCUGCUGCACCUGAUCAAGCACAGAGGAUACCUGUCGCAGAGAAAGAACGA |
| | | AGGAGAAACAGCAGACAAGGAACUGGGAGCACUGCUGAAGGGAGUCGCAGGAAAC |
| | | GCACACGCACUGCAGACAGGAGACUUCAGAACACCGGCAGAACUGGCACUGAACA |
| | | AGUUCGAAAAGGAAUCGGGACACAUCAGAAACCAGAGAUCGGACUACUCGCACAC |
| | | AUUCUCGAGAAAGGACCUGCAGGCAGAACUGAUCCUGCUGUUCGAAAAGCAGAAG |
| | | GAAUUCGGAAACCCGCACGUCUCGGGAGGACUGAAGGAAGGAAUCGAAACACUGC |
| | | UGAUGACACAGAGACCGGCACUGUCGGGAGACGCAGUCCAGAAGAUGCUGGGACA |
| | | CUGCACAUUCGAACCGGCAGAACCGAAGGCAGCAAAGAACACAUACACAGCAGAA |
| | | AGAUUCAUCUGGCUGACAAAGCUGAACAACCUGAGAAUCCUGGAACAGGGAUCGG |
| | | AAAGACCGCUGACAGACACAGAAAGAGCAACACUGAUGGACGAACCGUACAGAAA |
| | | GUCGAAGCUGACAUACGCACAGGCAAGAAAGCUGCUGGGACUGGAAGACACAGCA |
| | | UUCUUCAAGGGACUGAGAUACGGAAAGGACAACGCAGAAGCAUCGACACUGAUGG |
| | | AAAUGAAGGCAUACCACGCAAUCUCGAGAGCACUGGAAAAGGAAGGACUGAAGGA |
| | | CAAGAAGUCGCCGCUGAACCUGUCGCCGGAACUGCAGGACGAAAUCGGAACAGCA |
| | | UUCUCGCUGUUCAAGACAGACGAAGACAUCACAGGAAGACUGAAGGACAGAAUCC |
| | | AGCCGGAAAUCCUGGAAGCACUGCUGAAGCACAUCUCGUUCGACAAGUUCGUCCA |
| | | GAUCUCGCUGAAGGCACUGAGAAGAAUCGUCCCGCUGAUGGAACAGGGAAAGAGA |
| | | UACGACGAAGCAUGCGCAGAAAUCUACGGAGACCACUACGGAAAGAAGAACACAG |
| | | AAGAAAAGAUCUACCUGCCGCCGAUCCCGGCAGACGAAAUCAGAAACCCGGUCGU |
| | | CCUGAGAGCACUGUCGCAGGCAAGAAAGGUCAUCAACGGAGUCGUCAGAAGAUAC |
| | | GGAUCGCCGGCAAGAAUCCACAUCGAAACAGCAAGAGAAGUCGGAAAGUCGUUCA |
| | | AGGACAGAAAGGAAAUCGAAAAGAGACAGGAAGAAAACAGAAAGGACAGAGAAAA |
| | | GGCAGCAGCAAAGUUCAGAGAAUACUUCCCGAACUUCGUCGGAGAACCGAAGUCG |
| | | AAGGACAUCCUGAAGCUGAGACUGUACGAACAGCAGCACGGAAAGUGCCUGUACU |
| | | CGGGAAAGGAAAUCAACCUGGGAAGACUGAACGAAAAGGGAUACGUCGAAAUCGA |
| | | CCACGCACUGCCGUUCUCGAGAACAUGGGACGACUCGUUCAACAACAAGGUCCUG |
| | | GUCCUGGGAUCGGAAAACCAGAACAAGGGAAACCAGACACCGUACGAAUACUUCA |
| | | ACGGAAAGGACAACUCGAGAGAAUGGCAGGAAUUCAAGGCAAGAGUCGAAACAUC |
| | | GAGAUUCCCGAGAUCGAAGAAGCAGAGAAUCCUGCUGCAGAAGUUCGACGAAGAC |
| | | GGAUUCAAGGAAAGAAACCUGAACGACACAAGAUACGUCAACAGAUUCCUGUGCC |
| | | AGUUCGUCGCAGACAGAAUGAGACUGACAGGAAAGGGAAAGAAGAGAGUCUUCGC |
| | | AUCGAACGGACAGAUCACAAACCUGCUGAGAGGAUUCUGGGGACUGAGAAAGGUC |
| | | AGAGCAGAAAACGACAGACACCACGCACUGGACGCAGUCGUCGUCGCAUGCUCGA |
| | | CAGUCGCAAUGCAGCAGAAGAUCACAAGAUUCGUCAGAUACAAGGAAAUGAACGC |
| | | AUUCGACGGAAAGACAAUCGACAAGGAAACAGGAGAAGUCCUGCACCAGAAGACA |
| | | CACUUCCCGCAGCCGUGGGAAUUCUUCGCACAGGAAGUCAUGAUCAGAGUCUUCG |
| | | GAAAGCCGGACGGAAAGCCGGAAUUCGAAGAAGCAGACACACUGGAAAAGCUGAG |
| | | AACACUGCUGGCAGAAAAGCUGUCGUCGAGACCGGAAGCAGUCCACGAAUACGUC |
| | | ACACCGCUGUUCGUCUCGAGAGCACCGAACAGAAAGAUGUCGGGACAGGGACACA |
| | | UGGAAACAGUCAAGUCGGCAAAGAGACUGGACGAAGGAGUCUCGGUCCUGAGAGU |
| | | CCCGCUGACACAGCUGAAGCUGAAGGACCUGGAAAAGAUGGUCAACAGAGAAAGA |
| | | GAACCGAAGCUGUACGAAGCACUGAAGGCAAGACUGGAAGCACACAAGGACGACC |
| | | CGGCAAAGGCAUUCGCAGAACCGUUCUACAAGUACGACAAGGCAGGAAACAGAAC |
| | | ACAGCAGGUCAAGGCAGUCAGAGUCGAACAGGUCCAGAAGACAGGAGUCUGGGUC |
| | | AGAAACCACAACGGAAUCGCAGACAACGCAACAAUGGUCAGAGUAGACGUCUUCG |
| | | AAAAGGGAGACAAGUACUACCUGGUCCCGAUCUACUCGUGGCAGGUCGCAAAGGG |
| | | AAUCCUGCCGGACAGAGCAGUCGUCCAGGGAAAGGACGAAGAAGACUGGCAGCUG |
| | | AUCGACGACUCGUUCAACUUCAAGUUCUCGCUGCACCCGAACGACCUGGUCGAAG |
| | | UCAUCACAAAGAAGGCAAGAAUGUUCGGAUACUUCGCAUCGUGCCACAGAGGAAC |
| | | AGGAAACAUCAACAUCAGAAUCCACGACCUGGACCACAAGAUCGGAAAGAACGGA |
| | | AUCCUGGAAGGAAUCGGAGUCAAGACAGCACUGUCGUUCCAGAAGUACCAGAUCG |
| | | ACGAACUGGGAAAGGAAAUCAGACCGUGCAGACUGAAGAAGAGACCGCCGGUCAG |
| | | AUCCGGAAAGAGAACAGCAGACGGAUCGGAAUUCGAAUCGCCGAAGAAGAAGAGA |
| | | AAGGUCGAAUGA |
| 715 | Exemplary open | augGACGGCUCCGGCGGCGGCUCCCCCAAGAAGAAGCGGAAGGUGGAGGACAAGC |
| | reading frame | GGCCCGCCGCCACCAAGAAGGCCGGCCAGGCCAAGAAGAAGAAGGGCGGCUCCGG |
| | for Nme2Cas9 | CGGCGGCGCCGCCUUCAAGCCCAACCCCAUCAACUACAUCCUGGGCCUGGACAUC |
| | with HiBiT tag | GGCAUCGCCUCCGUGGGCUGGGCCAUGGUGGAGAUCGACGAGGAGGAGAACCCCA |
| | (mRNA V ORF) | UCCGGCUGAUCGACCUGGGCGUGCGGGUGUUCGAGCGGGCCGAGGUGCCCAAGAC |
| | | CGGCGACUCCCUGGCCAUGGCCCGGCGGCUGGCCCGGUCCGUGCGGCGGCUGACC |
| | | CGGCGGCGGGCCCACCGGCUGCUGCGGGCCCGGCGGCUGCUGAAGCGGGAGGGCG |
| | | UGCUGCAGGCCGCCGACUUCGACGAGAACGGCCUGAUCAAGUCCCUGCCCAACAC |
| | | CCCCUGGCAGCUGCGGGCCGCCGCCCUGGACCGGAAGCUGACCCCCCUGGAGUGG |
| | | UCCGCCGUGCUGCUGCACCUGAUCAAGCACCGGGGCUACCUGUCCCAGCGGAAGA |
| | | ACGAGGGCGAGACCGCCGACAAGGAGCUGGGCGCCCUGCUGAAGGGCGUGGCCAA |
| | | CAACGCCCACGCCCUGCAGACCGGCGACUUCCGGACCCCCGCCGAGCUGGCCCUG |
| | | AACAAGUUCGAGAAGGAGUCCGGCCACAUCCGGAACCAGCGGGGCGACUACUCCC |
| | | ACACCUUCUCCCGGAAGGACCUGCAGGCCGAGCUGAUCCUGCUGUUCGAGAAGCA |
| | | GAAGGAGUUCGGCAACCCCCACGUGUCCGGCGGCCUGAAGGAGGGCAUCGAGACC |
| | | CUGCUGAUGACCCAGCGGCCCGCCCUGUCCGGCGACGCCGUGCAGAAGAUGCUGG |
| | | GCCACUGCACCUUCGAGCCCGCCGAGCCCAAGGCCGCCAAGAACACCUACACCGC |
| | | CGAGCGGUUCAUCUGGCUGACCAAGCUGAACAACCUGCGGAUCCUGGAGCAGGGC |
| | | UCCGAGCGGCCCCUGACCGACACCGAGCGGGCCACCCUGAUGGACGAGCCCUACC |
| | | GGAAGUCCAAGCUGACCUACGCCCAGGCCCGGAAGCUGCUGGGCCUGGAGGACAC |
| | | CGCCUUCUUCAAGGGCCUGCGGUACGGCAAGGACAACGCCGAGGCCUCCACCCUG |
| | | AUGGAGAUGAAGGCCUACCACGCCAUCUCCCGGGCCCUGGAGAAGGAGGGCCUGA |
| | | AGGACAAGAAGUCCCCCCUGAACCUGUCCUCCGAGCUGCAGGACGAGAUCGGCAC |
| | | CGCCUUCUCCCUGUUCAAGACCGACGAGGACAUCACCGGCCGGCUGAAGGACCGG |
| | | GUGCAGCCCGAGAUCCUGGAGGCCCUGCUGAAGCACAUCUCCUUCGACAAGUUCG |
| | | UGCAGAUCUCCCUGAAGGCCCUGCGGCGGAUCGUGCCCCUGAUGGAGCAGGGCAA |
| | | GCGGUACGACGAGGCCUGCGCCGAGAUCUACGGCGACCACUACGGCAAGAAGAAC |
| | | ACCGAGGAGAAGAUCUACCUGCCCCCCAUCCCCGCCGACGAGAUCCGGAACCCCG |
| | | UGGUGCUGCGGGCCCUGUCCCAGGCCCGGAAGGUGAUCAACGGCGUGGUGCGGCG |
| | | GUACGGCUCCCCCGCCCGGAUCCACAUCGAGACCGCCCGGGAGGUGGGCAAGUCC |
| | | UUCAAGGACCGGAAGGAGAUCGAGAAGCGGCAGGAGGAGAACCGGAAGGACCGGG |
| | | AGAAGGCCGCCGCCAAGUUCCGGGAGUACUUCCCCAACUUCGUGGGCGAGCCCAA |
| | | GUCCAAGGACAUCCUGAAGCUGCGGCUGUACGAGCAGCAGCACGGCAAGUGCCUG |
| | | UACUCCGGCAAGGAGAUCAACCUGGUGCGGCUGAACGAGAAGGGCUACGUGGAGA |
| | | UCGACCACGCCCUGCCCUUCUCCCGGACCUGGGACGACUCCUUCAACAACAAGGU |
| | | GCUGGUGCUGGGCUCCGAGAACCAGAACAAGGGCAACCAGACCCCCUACGAGUAC |
| | | UUCAACGGCAAGGACAACUCCCGGGAGUGGCAGGAGUUCAAGGCCCGGGUGGAGA |
| | | CCUCCCGGUUCCCCCGGUCCAAGAAGCAGCGGAUCCUGCUGCAGAAGUUCGACGA |
| | | GGACGGCUUCAAGGAGUGCAACCUGAACGACACCCGGUACGUGAACCGGUUCCUG |
| | | UGCCAGUUCGUGGCCGACCACAUCCUGCUGACCGGCAAGGGCAAGCGGCGGGUGU |
| | | UCGCCUCCAACGGCCAGAUCACCAACCUGCUGCGGGGCUUCUGGGGCCUGCGGAA |
| | | GGUGCGGGCCGAGAACGACCGGCACCACGCCCUGGACGCCGUGGUGGUGGCCUGC |
| | | UCCACCGUGGCCAUGCAGCAGAAGAUCACCCGGUUCGUGCGGUACAAGGAGAUGA |
| | | ACGCCUUCGACGGCAAGACCAUCGACAAGGAGACCGGCAAGGUGCUGCACCAGAA |
| | | GACCCACUUCCCCCAGCCCUGGGAGUUCUUCGCCCAGGAGGUGAUGAUCCGGGUG |
| | | UUCGGCAAGCCCGACGGCAAGCCCGAGUUCGAGGAGGCCGACACCCCCGAGAAGC |
| | | UGCGGACCCUGCUGGCCGAGAAGCUGUCCUCCCGGCCCGAGGCCGUGCACGAGUA |
| | | CGUGACCCCCCUGUUCGUGUCCCGGGCCCCCAACCGGAAGAUGUCCGGCGCCCAC |
| | | AAGGACACCCUGCGGUCCGCCAAGCGGUUCGUGAAGCACAACGAGAAGAUCUCCG |
| | | UGAAGCGGGUGUGGCUGACCGAGAUCAAGCUGGCCGACCUGGAGAACAUGGUGAA |
| | | CUACAAGAACGGCCGGGAGAUCGAGCUGUACGAGGCCCUGAAGGCCCGGCUGGAG |
| | | GCCUACGGCGGCAACGCCAAGCAGGCCUUCGACCCCAAGGACAACCCCUUCUACA |
| | | AGAAGGGCGGCCAGCUGGUGAAGGCCGUGCGGGUGGAGAAGACCCAGGAGUCCGG |
| | | CGUGCUGCUGAACAAGAAGAACGCCUACACCAUCGCCGACAACGGCGACAUGGUG |
| | | CGGGUGGACGUGUUCUGCAAGGUGGACAAGAAGGGCAAGAACCAGUACUUCAUCG |
| | | UGCCCAUCUACGCCUGGCAGGUGGCCGAGAACAUCCUGCCCGACAUCGACUGCAA |
| | | GGGCUACCGGAUCGACGACUCCUACACCUUCUGCUUCUCCCUGCACAAGUACGAC |
| | | CUGAUCGCCUUCCAGAAGGACGAGAAGUCCAAGGUGGAGUUCGCCUACUACAUCA |
| | | ACUGCGACUCCUCCAACGGCCGGUUCUACCUGGCCUGGCACGACAAGGGCUCCAA |
| | | GGAGCAGCAGUUCCGGAUCUCCACCCAGAACCUGGUGCUGAUCCAGAAGUACCAG |
| | | GUGAACGAGCUGGGCAAGGAGAUCCGGCCCUGCCGGCUGAAGAAGCGGCCCCCCG |
| | | UGCGGUCCGAGUCCGCCACCCCCGAGUCCGUGUCCGGCUGGCGGCUGUUCAAGAA |
| | | GAUCUCCUAG |
| 716 | Exemplary open | augGACGGCUCCGGCGGCGGCUCCCCCAAGAAGAAGCGGAAGGUGGAGGACAAGC |
| | reading frame | GGCCCGCCGCCACCAAGAAGGCCGGCCAGGCCAAGAAGAAGAAGGGCGGCUCCGG |
| | for NmelCas9 | CGGCGGCGCAGCAUUCAAGCCAAACUCAAUCAAUUACAUCCUGGGACUGGACAUC |
| | with HiBiT tag | GGCAUCGCAUCCGUCGGGUGGGCUAUGGUCGAAAUCGACGAGGAGGAGAACCCCA |
| | (mRNA X ORF) | UCCGCCUGAUCGAUCUGGGCGUGCGCGUGUUUGAGAGGGCAGAGGUGCCUAAGAC |
| | | CGGCGACAGCCUGGCCAUGGCACGGAGACUGGCACGCUCCGUGAGGCGCCUGACC |
| | | CGGAGAAGGGCCCACAGACUGCUGAGGACACGCCGGCUGCUGAAGAGGGAGGGCG |
| | | UGCUGCAGGCCGCCAACUUCGAUGAGAAUGGCCUGAUCAAGUCCCUGCCCAAUAC |
| | | CCCUUGGCAGCUGAGGGCAGCCGCCCUGGACCGCAAGCUGACACCUCUGGAGUGG |
| | | UCCGCCGUGCUGCUGCACCUGAUCAAGCACCGGGGCUACCUGUCUCAGAGAAAGA |
| | | ACGAGGGCGAGACAGCCGAUAAGGAGCUGGGCGCCCUGCUGAAGGGAGUGGCAGG |
| | | AAAUGCACACGCCCUGCAGACCGGCGACUUUCGCACACCAGCCGAGCUGGCCCUG |
| | | AACAAGUUCGAGAAGGAGAGCGGCCACAUCCGCAAUCAGCGGUCUGACUAUAGCC |
| | | ACACCUUCUCCCGGAAGGAUCUGCAGGCCGAGCUGAUCCUGCUGUUUGAGAAGCA |
| | | GAAGGAGUUCGGCAACCCACACGUGUCUGGCGGCCUGAAGGAGGGCAUCGAGACA |
| | | CUGCUGAUGACACAGCGGCCCGCCCUGAGCGGCGACGCAGUGCAGAAGAUGCUGG |
| | | GACACUGCACCUUUGAGCCAGCCGAGCCCAAGGCCGCCAAGAAUACCUACACAGC |
| | | CGAGCGGUUCAUCUGGCUGACAAAGCUGAACAAUCUGAGGAUCCUGGAGCAGGGA |
| | | AGCGAGCGCCCACUGACCGACACAGAGAGGGCCACCCUGAUGGAUGAGCCCUACC |
| | | GCAAGUCCAAGCUGACAUAUGCACAGGCAAGGAAGCUGCUGGGCCUGGAGGACAC |
| | | CGCCUUCUUUAAGGGCCUGAGAUACGGCAAGGAUAACGCCGAGGCCUCUACACUG |
| | | AUGGAGAUGAAGGCCUAUCACGCCAUCAGCAGGGCCCUGGAGAAGGAGGGCCUGA |
| | | AGGACAAGAAGUCCCCACUGAAUCUGUCUCCCGAGCUGCAGGAUGAGAUCGGCAC |
| | | CGCCUUUAGCCUGUUCAAGACCGACGAGGAUAUCACAGGCAGACUGAAGGACAGG |
| | | AUCCAGCCAGAGAUCCUGGAGGCCCUGCUGAAGCACAUCAGCUUUGAUAAGUUCG |
| | | UGCAGAUCAGCCUGAAGGCCCUGCGGAGGAUCGUGCCACUGAUGGAGCAGGGCAA |
| | | GAGGUACGACGAGGCCUGCGCCGAAAUCUACGGCGAUCACUAUGGCAAGAAGAAC |
| | | ACAGAGGAGAAAAUCUACCUGCCCCCUAUCCCCGCCGAUGAGAUCAGGAACCCUG |
| | | UGGUGCUGCGCGCCCUGUCUCAGGCAAGAAAAGUGAUCAACGGAGUGGUGCGCCG |
| | | GUACGGCAGCCCCGCCAGAAUCCACAUCGAGACAGCCAGGGAAGUGGGCAAGUCC |
| | | UUUAAGGACAGAAAGGAGAUCGAGAAGAGGCAGGAGGAGAACAGAAAGGAUAGGG |
| | | AGAAGGCCGCCGCCAAGUUCAGAGAGUACUUUCCUAAUUUCGUGGGCGAGCCAAA |
| | | GUCCAAGGAUAUCCUGAAGCUGAGGCUGUACGAGCAGCAGCACGGCAAGUGUCUG |
| | | UAUUCUGGCAAGGAGAUCAACCUGGGCCGCCUGAAUGAGAAGGGCUAUGUGGAGA |
| | | UCGACCACGCCCUGCCUUUUUCUCGGACCUGGGACGAUAGCUUCAACAAUAAGGU |
| | | GCUGGUGCUGGGCUCUGAGAACCAGAAUAAGGGCAACCAGACACCCUACGAGUAU |
| | | UUCAACGGCAAGGACAAUAGCCGCGAGUGGCAGGAGUUUAAGGCAAGGGUGGAGA |
| | | CAAGCAGGUUCCCUCGGUCCAAGAAGCAGAGAAUCCUGCUGCAGAAGUUUGACGA |
| | | GGAUGGCUUCAAGGAGAGGAACCUGAAUGACACCCGCUACGUGAAUCGGUUUCUG |
| | | UGCCAGUUCGUGGCCGAUAGAAUGAGGCUGACCGGCAAGGGCAAGAAGAGAGUGU |
| | | UUGCCUCCAACGGCCAGAUCACAAAUCUGCUGAGGGGCUUCUGGGGCCUGAGAAA |
| | | GGUGAGGGCAGAGAACGACAGGCACCACGCACUGGAUGCAGUGGUGGUGGCAUGU |
| | | UCUACCGUGGCCAUGCAGCAGAAGAUCACACGCUUUGUGCGGUAUAAGGAGAUGA |
| | | AUGCCUUCGACGGCAAGACCAUCGAUAAGGAGACAGGCGAGGUGCUGCACCAGAA |
| | | GACACACUUUCCUCAGCCAUGGGAGUUCUUUGCCCAGGAAGUGAUGAUCCGGGUG |
| | | UUUGGCAAGCCUGACGGCAAGCCAGAGUUCGAGGAGGCCGAUACCCUGGAGAAGC |
| | | UGAGAACACUGCUGGCAGAGAAGCUGAGCUCCAGGCCCGAGGCAGUGCACGAGUA |
| | | CGUGACCCCACUGUUCGUGUCUAGAGCCCCCAACAGGAAGAUGAGCGGCCAGGGC |
| | | CACAUGGAGACAGUGAAGUCCGCCAAGAGACUGGACGAGGGCGUGUCUGUGCUGA |
| | | GGGUGCCUCUGACACAGCUGAAGCUGAAGGAUCUGGAGAAGAUGGUGAAUCGCGA |
| | | GCGGGAGCCAAAGCUGUAUGAGGCCCUGAAGGCAAGGCUGGAGGCACACAAGGAC |
| | | GAUCCUGCCAAGGCCUUUGCCGAGCCAUUCUACAAGUAUGAUAAGGCCGGCAACA |
| | | GAACCCAGCAGGUGAAGGCCGUGAGGGUGGAGCAGGUGCAGAAGACAGGCGUGUG |
| | | GGUGCGCAACCACAAUGGCAUCGCCGACAAUGCUACCAUGGUGCGGGUGGACGUG |
| | | UUUGAGAAGGGCGAUAAGUACUAUCUGGUGCCCAUCUACAGCUGGCAGGUGGCCA |
| | | AGGGCAUCCUGCCUGAUAGAGCCGUGGUGCAGGGCAAGGACGAGGAGGAUUGGCA |
| | | GCUGAUCGACGAUUCCUUCAACUUUAAGUUCUCUCUGCACCCCAAUGACCUGGUG |
| | | GAAGUGAUCACCAAGAAGGCCAGGAUGUUUGGCUACUUCGCCUCCUGCCACCGCG |
| | | GCACAGGCAACAUCAAUAUCCGGAUCCACGACCUGGAUCACAAGAUCGGCAAGAA |
| | | CGGCAUCCUGGAGGGCAUCGGCGUGAAGACAGCCCUGAGCUUCCAGAAGUAUCAG |
| | | AUCGACGAGCUGGGCAAGGAGAUCAGACCUUGUAGGCUGAAGAAGCGCCCACCCG |
| | | UGCGGUCCGAGUCCGCCACCCCCGAGUCCGUGUCCGGCUGGCGGCUGUUCAAGAA |
| | | GAUCUCCUAG |
| 717 | Exemplary amino | augGACGGCUCCGGCGGCGGCUCCCCCAAGAAGAAGCGGAAGGUGGAGGACAAGC |
| | acid open | GGCCCGCCGCCACCAAGAAGGCCGGCCAGGCCAAGAAGAAGAAGGGCGGCUCCGG |
| | reading frame | CGGCGGCGCCGCCUUCAAGCCCAACUCCAUCAACUACAUCCUGGGCCUGGACAUC |
| | for Nme1Cas9 | GGCAUCGCCUCCGUGGGCUGGGCCAUGGUGGAGAUCGACGAGGAGGAGAACCCCA |
| | with HiBiT tag | UCCGGCUGAUCGACCUGGGCGUGCGGGUGUUCGAGCGGGCCGAGGUGCCCAAGAC |
| | (mRNA Y ORF) | CGGCGACUCCCUGGCCAUGGCCCGGCGGCUGGCCCGGUCCGUGCGGCGGCUGACC |
| | | CGGCGGCGGGCCCACCGGCUGCUGCGGACCCGGCGGCUGCUGAAGCGGGAGGGCG |
| | | UGCUGCAGGCCGCCAACUUCGACGAGAACGGCCUGAUCAAGUCCCUGCCCAACAC |
| | | CCCCUGGCAGCUGCGGGCCGCCGCCCUGGACCGGAAGCUGACCCCCCUGGAGUGG |
| | | UCCGCCGUGCUGCUGCACCUGAUCAAGCACCGGGGCUACCUGUCCCAGCGGAAGA |
| | | ACGAGGGCGAGACCGCCGACAAGGAGCUGGGCGCCCUGCUGAAGGGCGUGGCCGG |
| | | CAACGCCCACGCCCUGCAGACCGGCGACUUCCGGACCCCCGCCGAGCUGGCCCUG |
| | | AACAAGUUCGAGAAGGAGUCCGGCCACAUCCGGAACCAGCGGUCCGACUACUCCC |
| | | ACACCUUCUCCCGGAAGGACCUGCAGGCCGAGCUGAUCCUGCUGUUCGAGAAGCA |
| | | GAAGGAGUUCGGCAACCCCCACGUGUCCGGCGGCCUGAAGGAGGGCAUCGAGACC |
| | | CUGCUGAUGACCCAGCGGCCCGCCCUGUCCGGCGACGCCGUGCAGAAGAUGCUGG |
| | | GCCACUGCACCUUCGAGCCCGCCGAGCCCAAGGCCGCCAAGAACACCUACACCGC |
| | | CGAGCGGUUCAUCUGGCUGACCAAGCUGAACAACCUGCGGAUCCUGGAGCAGGGC |
| | | UCCGAGCGGCCCCUGACCGACACCGAGCGGGCCACCCUGAUGGACGAGCCCUACC |
| | | GGAAGUCCAAGCUGACCUACGCCCAGGCCCGGAAGCUGCUGGGCCUGGAGGACAC |
| | | CGCCUUCUUCAAGGGCCUGCGGUACGGCAAGGACAACGCCGAGGCCUCCACCCUG |
| | | AUGGAGAUGAAGGCCUACCACGCCAUCUCCCGGGCCCUGGAGAAGGAGGGCCUGA |
| | | AGGACAAGAAGUCCCCCCUGAACCUGUCCCCCGAGCUGCAGGACGAGAUCGGCAC |
| | | CGCCUUCUCCCUGUUCAAGACCGACGAGGACAUCACCGGCCGGCUGAAGGACCGG |
| | | AUCCAGCCCGAGAUCCUGGAGGCCCUGCUGAAGCACAUCUCCUUCGACAAGUUCG |
| | | UGCAGAUCUCCCUGAAGGCCCUGCGGCGGAUCGUGCCCCUGAUGGAGCAGGGCAA |
| | | GCGGUACGACGAGGCCUGCGCCGAGAUCUACGGCGACCACUACGGCAAGAAGAAC |
| | | ACCGAGGAGAAGAUCUACCUGCCCCCCAUCCCCGCCGACGAGAUCCGGAACCCCG |
| | | UGGUGCUGCGGGCCCUGUCCCAGGCCCGGAAGGUGAUCAACGGCGUGGUGCGGCG |
| | | GUACGGCUCCCCCGCCCGGAUCCACAUCGAGACCGCCCGGGAGGUGGGCAAGUCC |
| | | UUCAAGGACCGGAAGGAGAUCGAGAAGCGGCAGGAGGAGAACCGGAAGGACCGGG |
| | | AGAAGGCCGCCGCCAAGUUCCGGGAGUACUUCCCCAACUUCGUGGGCGAGCCCAA |
| | | GUCCAAGGACAUCCUGAAGCUGCGGCUGUACGAGCAGCAGCACGGCAAGUGCCUG |
| | | UACUCCGGCAAGGAGAUCAACCUGGGCCGGCUGAACGAGAAGGGCUACGUGGAGA |
| | | UCGACCACGCCCUGCCCUUCUCCCGGACCUGGGACGACUCCUUCAACAACAAGGU |
| | | GCUGGUGCUGGGCUCCGAGAACCAGAACAAGGGCAACCAGACCCCCUACGAGUAC |
| | | UUCAACGGCAAGGACAACUCCCGGGAGUGGCAGGAGUUCAAGGCCCGGGUGGAGA |
| | | CCUCCCGGUUCCCCCGGUCCAAGAAGCAGCGGAUCCUGCUGCAGAAGUUCGACGA |
| | | GGACGGCUUCAAGGAGCGGAACCUGAACGACACCCGGUACGUGAACCGGUUCCUG |
| | | UGCCAGUUCGUGGCCGACCGGAUGCGGCUGACCGGCAAGGGCAAGAAGCGGGUGU |
| | | UCGCCUCCAACGGCCAGAUCACCAACCUGCUGCGGGGCUUCUGGGGCCUGCGGAA |
| | | GGUGCGGGCCGAGAACGACCGGCACCACGCCCUGGACGCCGUGGUGGUGGCCUGC |
| | | UCCACCGUGGCCAUGCAGCAGAAGAUCACCCGGUUCGUGCGGUACAAGGAGAUGA |
| | | ACGCCUUCGACGGCAAGACCAUCGACAAGGAGACCGGCGAGGUGCUGCACCAGAA |
| | | GACCCACUUCCCCCAGCCCUGGGAGUUCUUCGCCCAGGAGGUGAUGAUCCGGGUG |
| | | UUCGGCAAGCCCGACGGCAAGCCCGAGUUCGAGGAGGCCGACACCCUGGAGAAGC |
| | | UGCGGACCCUGCUGGCCGAGAAGCUGUCCUCCCGGCCCGAGGCCGUGCACGAGUA |
| | | CGUGACCCCCCUGUUCGUGUCCCGGGCCCCCAACCGGAAGAUGUCCGGCCAGGGC |
| | | CACAUGGAGACCGUGAAGUCCGCCAAGCGGCUGGACGAGGGCGUGUCCGUGCUGC |
| | | GGGUGCCCCUGACCCAGCUGAAGCUGAAGGACCUGGAGAAGAUGGUGAACCGGGA |
| | | GCGGGAGCCCAAGCUGUACGAGGCCCUGAAGGCCCGGCUGGAGGCCCACAAGGAC |
| | | GACCCCGCCAAGGCCUUCGCCGAGCCCUUCUACAAGUACGACAAGGCCGGCAACC |
| | | GGACCCAGCAGGUGAAGGCCGUGCGGGUGGAGCAGGUGCAGAAGACCGGCGUGUG |
| | | GGUGCGGAACCACAACGGCAUCGCCGACAACGCCACCAUGGUGCGGGUGGACGUG |
| | | UUCGAGAAGGGCGACAAGUACUACCUGGUGCCCAUCUACUCCUGGCAGGUGGCCA |
| | | AGGGCAUCCUGCCCGACCGGGCCGUGGUGCAGGGCAAGGACGAGGAGGACUGGCA |
| | | GCUGAUCGACGACUCCUUCAACUUCAAGUUCUCCCUGCACCCCAACGACCUGGUG |
| | | GAGGUGAUCACCAAGAAGGCCCGGAUGUUCGGCUACUUCGCCUCCUGCCACCGGG |
| | | GCACCGGCAACAUCAACAUCCGGAUCCACGACCUGGACCACAAGAUCGGCAAGAA |
| | | CGGCAUCCUGGAGGGCAUCGGCGUGAAGACCGCCCUGUCCUUCCAGAAGUACCAG |
| | | AUCGACGAGCUGGGCAAGGAGAUCCGGCCCUGCCGGCUGAAGAAGCGGCCCCCCG |
| | | UGCGGUCCGAGUCCGCCACCCCCGAGUCCGUGUCCGGCUGGCGGCUGUUCAAGAA |
| | | GAUCUCCUAG |
| 718 | Exemplary open | augGACGGCUCCGGCGGCGGCUCCCCCAAGAAGAAGCGGAAGGUGGAGGACAAGC |
| | reading frame | GGCCCGCCGCCACCAAGAAGGCCGGCCAGGCCAAGAAGAAGAAGGGCGGCUCCGG |
| | for Nme3Cas9 | CGGCGCCGCCUUCAAGCCCAACCCCAUCAACUACAUCCUGGGCCUGGACAUCGGC |
| | with HiBiT tag | AUCGCCUCCGUGGGCUGGGCCAUGGUGGAGAUCGACGAGGAGGAGAACCCCAUCC |
| | (mRNA Z ORF) | GGCUGAUCGACCUGGGCGUGCGGGUGUUCGAGCGGGCCGAGGUGCCCAAGACCGG |
| | | CGACUCCCUGGCCAUGGCCCGGCGGCUGGCCCGGUCCGUGCGGCGGCUGACCCGG |
| | | CGGCGGGCCCACCGGCUGCUGCGGGCCCGGCGGCUGCUGAAGCGGGAGGGCGUGC |
| | | UGCAGGCCGCCGACUUCGACGAGAACGGCCUGAUCAAGUCCCUGCCCAACACCCC |
| | | CUGGCAGCUGCGGGCCGCCGCCCUGGACCGGAAGCUGACCCCCCUGGAGUGGUCC |
| | | GCCGUGCUGCUGCACCUGAUCAAGCACCGGGGCUACCUGUCCCAGCGGAAGAACG |
| | | AGGGCGAGACCGCCGACAAGGAGCUGGGCGCCCUGCUGAAGGGCGUGGCCGACAA |
| | | CGCCCACGCCCUGCAGACCGGCGACUUCCGGACCCCCGCCGAGCUGGCCCUGAAC |
| | | AAGUUCGAGAAGGAGUGCGGCCACAUCCGGAACCAGCGGGGCGACUACUCCCACA |
| | | CCUUCUCCCGGAAGGACCUGCAGGCCGAGCUGAACCUGCUGUUCGAGAAGCAGAA |
| | | GGAGUUCGGCAACCCCCACGUGUCCGGCGGCCUGAAGGAGGGCAUCGAGACCCUG |
| | | CUGAUGACCCAGCGGCCCGCCCUGUCCGGCGACGCCGUGCAGAAGAUGCUGGGCC |
| | | ACUGCACCUUCGAGCCCGCCGAGCCCAAGGCCGCCAAGAACACCUACACCGCCGA |
| | | GCGGUUCAUCUGGCUGACCAAGCUGAACAACCUGCGGAUCCUGGAGCAGGGCUCC |
| | | GAGCGGCCCCUGACCGACACCGAGCGGGCCACCCUGAUGGACGAGCCCUACCGGA |
| | | AGUCCAAGCUGACCUACGCCCAGGCCCGGAAGCUGCUGUCCCUGGAGGACACCGC |
| | | CUUCUUCAAGGGCCUGCGGUACGGCAAGGACAACGCCGAGGCCUCCACCCUGAUG |
| | | GAGAUGAAGGCCUACCACACCAUCUCCCGGGCCCUGGAGAAGGAGGGCCUGAAGG |
| | | ACAAGAAGUCCCCCCUGAACCUGUCCCCCGAGCUGCAGGACGAGAUCGGCACCGC |
| | | CUUCUCCCUGUUCAAGACCGACGAGGACAUCACCGGCCGGCUGAAGGACCGGAUC |
| | | CAGCCCGAGAUCCUGGAGGCCCUGCUGAAGCACAUCUCCUUCGACAAGUUCGUGC |
| | | AGAUCUCCCUGAAGGCCCUGCGGCGGAUCGUGCCCCUGAUGGAGCAGGGCAAGCG |
| | | GUACGACGAGGCCUGCGCCGAGAUCUACGGCGACCACUACGGCAAGAAGAACACC |
| | | GAGGAGAAGAUCUACCUGCCCCCCAUCCCCGCCGACGAGAUCCGGAACCCCGUGG |
| | | UGCUGCGGGCCCUGUCCCAGGCCCGGAAGGUGAUCAACGGCGUGGUGCGGCGGUA |
| | | CGGCUCCCCCGCCCGGAUCCACAUCGAGACCGCCCGGGAGGUGGGCAAGUCCUUC |
| | | AAGGACCGGAAGGAGAUCGAGAAGCGGCAGGAGGAGAACCGGAAGGACCGGGAGA |
| | | AGGCCGCCGCCAAGUUCCGGGAGUACUUCCCCAACUUCGUGGGCGAGCCCAAGUC |
| | | CAAGGACAUCCUGAAGCUGCGGCUGUACGAGCAGCAGCACGGCAAGUGCCUGUAC |
| | | UCCGGCAAGGAGAUCAACCUGGGCCGGCUGAACGAGAAGGGCUACGUGGAGAUCG |
| | | ACCACGCCCUGCCCUUCUCCCGGACCUGGGACGACUCCUUCAACAACAAGGUGCU |
| | | GGUGCUGGGCUCCGAGAACCAGAACAAGGGCAACCAGACCCCCUACGAGUACUUC |
| | | AACGGCAAGGACAACUCCCGGGAGUGGCAGGAGUUCAAGGCCCGGGUGGAGACCU |
| | | CCCGGUUCCCCCGGUCCAAGAAGCAGCGGAUCCUGCUGCAGAAGUUCGACGAGGA |
| | | CGGCUUCAAGGAGCGGAACCUGAACGACACCCGGUACGUGAACCGGUUCCUGUGC |
| | | CAGUUCGUGGCCGACCGGAUGCGGCUGACCGGCAAGGGCAAGAAGCGGGUGUUCG |
| | | CCUCCAACGGCCAGAUCACCAACCUGCUGCGGGGCUUCUGGGGCCUGCGGAAGGU |
| | | GCGGGCCGAGAACGACCGGCACCACGCCCUGGACGCCGUGGUGGUGGCCUGCUCC |
| | | ACCGUGGCCAUGCAGCAGAAGAUCACCCGGUUCGUGCGGUACAAGGAGAUGAACG |
| | | CCUUCGACGGCAAGACCAUCGACAAGGAGACCGGCGAGGUGCUGCACCAGAAGAC |
| | | CCACUUCCCCCAGCCCUGGGAGUUCUUCGCCCAGGAGGUGAUGAUCCGGGUGUUC |
| | | GGCAAGCCCGACGGCAAGCCCGAGUUCGAGGAGGCCGACACCCCCGAGAAGCUGC |
| | | GGACCCUGCUGGCCGAGAAGCUGUCCUCCCGGCCCGAGGCCGUGCACGAGUACGU |
| | | GACCCCCCUGUUCGUGUCCCGGGCCCCCAACCGGAAGAUGUCCGGCCAGGGCCAC |
| | | AUGGAGACCGUGAAGUCCGCCAAGCGGCUGGACGAGGGCGUGUCCGUGCUGCGGG |
| | | UGCCCCUGACCCAGCUGAAGCUGAAGGACCUGGAGAAGAUGGUGAACCGGGAGCG |
| | | GGAGCCCAAGCUGUACGAGGCCCUGAAGGCCCGGCUGGAGGCCCACAAGGACGAC |
| | | CCCGCCAAGGCCUUCGCCGAGCCCUUCUACAAGUACGACAAGGCCGGCAACCGGA |
| | | CCCAGCAGGUGAAGGCCGUGCGGGUGGAGCAGGUGCAGAAGACCGGCGUGUGGGU |
| | | GCGGAACCACAACGGCAUCGCCGACAACGCCACCAUGGUGCGGGUGGACGUGUUC |
| | | GAGAAGGGCGACAAGUACUACCUGGUGCCCAUCUACUCCUGGCAGGUGGCCAAGG |
| | | GCAUCCUGCCCGACCGGGCCGUGGUGGCCUACGCCGACGAGGAGGACUGGACCGU |
| | | GAUCGACGAGUCCUUCCGGUUCAAGUUCGUGCUGUACUCCAACGACCUGAUCAAG |
| | | GUGCAGCUGAAGAAGGACUCCUUCCUGGGCUACUUCUCCGGCCUGGACCGGGCCA |
| | | CCGGCGCCAUCUCCCUGCGGGAGCACGACCUGGAGAAGUCCAAGGGCAAGGACGG |
| | | CAUGCACCGGAUCGGCGUGAAGACCGCCCUGUCCUUCCAGAAGUACCAGAUCGAC |
| | | GAGAUGGGCAAGGAGAUCCGGCCCUGCCGGCUGAAGAAGCGGCCCCCCGUGCGGU |
| | | CCGAGUCCGCCACCCCCGAGUCCGUGUCCGGCUGGCGGCUGUUCAAGAAGAUCUC |
| | | CUAG |

TABLE 4B
Additional Sequences

| | | |
|---|---|---|
| G000502 | 758 | ACACAAAUACCAGUCCAGCGGUUUUAGAGCUAGAAAUAGCAAGUUAAAAUAAGGCUAGUCCGUUAUCAACUUGAAAA |
| (unmodified) | | AGUGGCACCGAGUCGGUGCUUUU |
| G000502 | 759 | mA*mC*mA*CAAAUACCAGUCCAGCGGUUUUAGAmGmCmUmAmGmAmAmAmUmAmGmCAAGUUAAAAUAAGGCUAGU |
| | | CCGUUAUCAmAmCmUmUmGmAmAmAmAmAmGmUmGmGmCmAmCmCmGmAmGmUmCmGmGmUmGmCmU*mU*mU*mU |
| RNAWT- | 760 | GGCGCTTCGCCAGCCATTCCTGCGTTGTAGCTCCCTTTCTCATTTCGGAAACGAAATGAGAACCGTTGCTACAATAA |
| 145 | | GGCCGTCTGAAAAGATGTGCCGCAACGCTCTGCCCCTTAAAGCTTCTGCTTTAAGGGGCATCGTTTAT |
| RNA9- | 761 | GGCGCTTCGCCAGCCATTCCTGCGTTGTAGCCTTCTGAAAAGAAGGCTACAATAAGGCCGTCTGAAAAGATGTGCCG |
| 102 | | CAACGCTCTGCTTCTGCATCGTtt |
| RNA7- | 762 | GGCGCTTCGCCAGCCATTCCTGCGTTGTAGCTCCCTCTGAAAAGCCGTTGCTACAATAAGGCCGTCTGAAAAGATGT |
| 106 | | GCCGCAACGCTCTGCTTCTGCATCGTtt |
| RNA8- | 763 | GGCGCTTCGCCAGCCATTCCTGCGTTGTAGCTCCCTTTCTGAAAAGAACCGTTGCTACAATAAGGCCGTCTGAAAAG |
| 106 | | ATGTGCCGCAACGCTCTGCTTCTGCAtt |
| RNA6- | 764 | GGCGCTTCGCCAGCCATTCCTGCGTTGTAGCTCCCTTTCTGAAAAGAACCGTTGCTACAATAAGGCCGTCTGAAAAG |
| 110 | | ATGTGCCGCAACGCTCTGCTTCTGCATCGTtt |
| RNA6b- | 765 | GGCGCTTCGCCAGCCATTCCTGCGTTGTAGCCTTCTCATTGAAAAATGAGAAGGCTACAATAAGGCCGTCTGAAAAG |
| 110 | | ATGTGCCGCAACGCTCTGCTTCTGCATCGttt |
| RNA5- | 766 | GGCGCTTCGCCAGCCATTCCTGCGTTGTAGCTCCCTCTGAAAAGCCGTTGCTACAATAAGGCCGTCTGAAAAGATGT |
| 112 | | GCCGCAACGCTCTGCCCCTTTTCTAAGGGGCAtt |
| RNA4- | 767 | GGCGCTTCGCCAGCCATTCCTGCGTTGTAGCTCCCTTTCTGAAAAGAACCGTTGCTACAATAAGGCCGTCTGAAAAG |
| 116 | | ATGTGCCGCAACGCTCTGCCCCTTTTCTAAGGGGCAtt |
| RNA3- | 768 | gGGGCGCTTCGCCAGCCATTCCTGCGTTGTAGCTCCCTTTCTCAGGAAACTGAGAACCGTTGCTACAATAAGGCCGT |
| 122 | | CTGAAAAGATGTGCCGCAACGCTCTGCCCCTTTTCTAAGGGGCAT |
| RNA2- | 769 | GGCGCTTCGCCAGCCATTCCTGCGTTGTAGCTCCCTTCTCAGGAAACTGAGAACCGTTGCTACAATAAGGCCGTCTG |
| 126 | | AAAAGATGTGCCGCAACGCTCTGCCCCTtTTCTAAGGGGCATCGtttT |
| RNA17- | 770 | GGCGCTTCGCCAGCCATTCCTGCGttGtAGCtCCCtGAAACCGttGCtACAAtAAGGCCGtGAAAAtGtGCCGCAAC |
| 101 | | GCtCtGCCttCtGGCAtCGtttT |
| RNA18- | 771 | GGCGCTTCGCCAGCCATTCCTGCGttGtAGCtCCCtGAAACCGttGCtACAAtAAGGCCGtCGAAAGAtGtGCCGCA |
| 103 | | ACGCtCtGCCttCtGGCAtCGtttT |
| RNA15- | 772 | GGCGCTTCGCCAGCCATTCCTGCGttGtAGCtCCCtGAAACCGttGCtACAAtAAGGCCGtGAAAAtGtGCCGCAAC |
| 105 | | GCtCtGCCGCttCtGCGGCAtCGtttT |
| RNA16- | 773 | GGCGCTTCGCCAGCCATTCCTGCGttGtAGCtCCCtGAAACCGttGCtACAAtAAGGCCGtCtGAAAAGAtGtGCCG |
| 105 | | CAACGCtCtGCCttCtGGCAtCGtttT |
| RNA13- | 774 | GGCGCTTCGCCAGCCATTCCTGCGttGtAGCtCCCttCGGAAACGACCGttGCtACAAtAAGGCCGtGAAAAtGtGC |
| 107 | | CGCAACGCtCtGCCttCtGGCAtCGtttT |
| RNA14- | 775 | GGCGCTTCGCCAGCCATTCCTGCGttGtAGCtCCCtGAAACCGttGCtACAAtAAGGCCGtCtGAAAAGAtGtGCCG |
| 109 | | CAACGCtCtGCCGCttCtGCGGCAtCGtttT |
| RNA12- | 776 | GGCGCTTCGCCAGCCATTCCTGCGttGtAGCtCCCttCGGAAACGACCGttGCtACAAtAAGGCCGtCtGAAAAGAt |
| 111 | | GtGCCGCAACGCtCtGCCttCtGGCAtCGtttT |
| RNA11- | 777 | GGCGCTTCGCCAGCCATTCCTGCGttGtAGCtCCCttCGGAAACGACCGttGCtACAAtAAGGCCGtGAAAAtGtGC |
| 113 | | CGCAACGCtCtGCCGCttCtGCGGCAtCGtttTTT |
| RNA10- | 778 | GGCGCTTCGCCAGCCATTCCTGCGttGtAGCtCCCttCGGAAACGACCGttGCtACAAtAAGGCCGtCtGAAAAGAt |
| 115 | | GtGCCGCAACGCtCtGCCGCttCtGCGGCAtCGtttT |
| R10B- | 779 | GGCGCTTCGCCAGCCATTCCTGCGTTGTAGCTCCCTTGGAAACACCGTTGCTACAATAAGGCCGTTGAAAAATGTGC |
| 111 | | CGCAACGCTCTGCCCTTCTGGGCATCGTTTTTT |
| R10E- | 780 | GGCGCTTCGCCAGCCATTCCTGCGTTGTAGCTCCCTTGGAAACACCGTTGCTACAATAAGGCCGTCGAAAGATGTGC |
| 109 | | CGCAACGCTCTGCCCTTCTGGGCATCGTTTT |
| R10F- | 781 | GGCGCTTCGCCAGCCATTCCTGCGTTGTAGCTCCCTTGGAAACACCGTTGCTACAATAAGGCCGTCTGAAAAGATGT |
| 113 | | GCCGCAACGCTCTGCCGCTTCTGCGGCATCGTTTT |
| R10G- | 782 | GGCGCTTCGCCAGCCATTCCTGCGTTGTAGCTCCCTTCGGAAACGACCGTTGCTACAATAAGGCCGTCTGAAAAGAT |
| 113 | | GTGCCGCAACGCTCTGCCGTTCTCGGCATCGTTTT |
| R10H- | 783 | GGCGCTTCGCCAGCCATTCCTGCGTTGTAGCTCCCTTCGGAAACGACCGTTGCTACAATAAGGCCGTCTGAAAAGAT |
| 113 | | GTGCCGCAACGCTCTGCCCTTCTGGGCATCGTTTT |
| R10I- | 784 | GGCGCTTCGCCAGCCATTCCTGCGTTGTAGCTCCCTTCGGAAACGACCGTTGCTACAATAAGGCCGTTGAAAAATGT |
| 113 | | GCCGCAACGCTCTGCCGCTTCTGCGGCATCGTTTT |
| R10J- | 785 | GGCGCTTCGCCAGCCATTCCTGCGTTGTAGCTCCCTTCGGAAACGACCGTTGCTACAATAAGGCCGTCGAAAGATGT |
| 113 | | GCCGCAACGCTCTGCCGCTTCTGCGGCATCGTTTT |
| R19- | 786 | GGCGCTTCGCCAGCCATTCCTGCGTTGTAGCTCCCTTCGGAACGACCGTTGCTACAATAAGGCCGTCTGAAAGATGT |
| 112 | | GCCGCAACGCTCTGCCGCTCTGCGGCATCGTTTT |
| ES99 | 787 | GGCGCTTCGCCAGCCATTCCTGCGTTGTAGCTCCCGAAACGTTGCTACAATAAGGCCGTCTGAAAAGATGTGCCGCA |
| | | ACGCTCTGCTTCTGCATCGTT |
| ES121 | 788 | gGGGCGCTTCGCCAGCCATTCCTGCGTTGTAGCTCCCGAAACGTTGCTACAATAAGGCCCGTCTGAAAAGATGTGCC |
| | | GCAACGCTCTGCCCCTTAAAGCTTCTGCTTTAAGGGGCATCGTTTA |
| ES111 | 789 | GGCGCTTCGCCAGCCATTCCTGCGTTGTAGCTCCCGAAACGTTGCTACAATAAGGCCGTCTGAAAAGATGTGCCGCA |
| | | ACGCTCTGCCCCTTTTCTAAGGGGCATCGTTTA |
| ES105 | 790 | GGCGCTTCGCCAGCCATTCCTGCGTTGTAGCTCCCGAAACGTTGCTACAATAAGGCCGTCTGAAAAGATGTGCCGCA |
| | | ACGCTCTGCttCTGCATCGTTTAtttT |
| | 791- | Not used |
| | 799 | |
| G02306 | 800 | mC*mC*mA*mAmGUGmUmCUmUCmCAGUAmCGAUmUUGmGUUGmUmAmGmCUCCCmU(L1)mCmCGUUmGmCUAmCA |
| 6 | | AU*AAGmGmCCmGmUmC(L1)mGmAmUGUGCmCGmCAAmCGCUCUmGmCC(L1)GGCAUCG*mU*mU |
| G02306 | 801 | mC*mU*mU*mCmACCmAmGGmAGmAAGCCmGUCAmCACmGUUGmUmAmGmCUCCCmU(L1)mCmCGUUmGmCUAmCA |
| 7 | | AU*AAGmGmCCmGmUmC(L1)mGmAmUGUGCmCGmCAAmCGCUCUmGmCC(L1)GGCAUCG*mU*mU |
| G02306 | 802 | mC*mU*mU*mCmACCmAmAGmAGmAAGCCmGUCAmCACmGUUGmUmAmGmCUCCCmU(L1)mCmCGUUmGmCUAmCA |
| 8 | | AU*AAGmGmCCmGmUmC(L1)mGmAmUGUGCmCGmCAAmCGCUCUmGmCC(L1)GGCAUCG*mU*mU |
| G02306 | 803 | CUUCACCAGGAGAAGCCGUCACACmGUUGmUmAmGmCUCCCmU(L1)mCmCGUUmGmCUAmCAAU*AAGmGmCCmGm |
| 9 | | UmC(L1)mGmAmUGUGCmCGmCAAmCGCUCUmGmCC(L1)GGCAUCG*mU*mU |
| G02307 | 804 | mC*mU*mU*CACCAGGAGAAGCCGUCACACmGUUGmUmAmGmCUCCCmU(L1)mCmCGUUmGmCUAmCAAU*AAGmG |
| 0 | | mCCmGmUmC(L1)mGmAmUGUGCmCGmCAAmCGCUCUmGmCC(L1)GGCAUCG*mU*mU |
| G02307 | 805 | mC*mU*mU*mCACCAGGAGAAGCCGUCACACmGUUGmUmAmGmCUCCCmU(L1)mCmCGUUmGmCUAmCAAU*AAGm |
| 1 | | GmCCmGmUmC(L1)mGmAmUGUGCmCGmCAAmCGCUCUmGmCC(L1)GGCAUCG*mU*mU |
| G02307 | 806 | mC*mU*mU*CmACCAGGAGAAGCCGUCACACmGUUGmUmAmGmCUCCCmU(L1)mCmCGUUmGmCUAmCAAU*AAGm |
| 2 | | GmCCmGmUmC(L1)mGmAmUGUGCmCGmCAAmCGCUCUmGmCC(L1)GGCAUCG*mU*mU |
| G02307 | 807 | mC*mU*mU*CACCAmGGAGAAGCCGUCACACmGUUGmUmAmGmCUCCCmU(L1)mCmCGUUmGmCUAmCAAU*AAGm |
| 3 | | GmCCmGmUmC(L1)mGmAmUGUGCmCGmCAAmCGCUCUmGmCC(L1)GGCAUCG*mU*mU |
| G02307 | 808 | mC*mU*mU*CACCAGGmAGAAGCCGUCACACmGUUGmUmAmGmCUCCCmU(L1)mCmCGUUmGmCUAmCAAU*AAGm |
| 4 | | GmCCmGmUmC(L1)mGmAmUGUGCmCGmCAAmCGCUCUmGmCC(L1)GGCAUCG*mU*mU |
| G02307 | 809 | mC*mU*mU*CACCAGGAGmAAGCCGUCACACmGUUGmUmAmGmCUCCCmU(L1)mCmCGUUmGmCUAmCAAU*AAGm |
| 5 | | GmCCmGmUmC(L1)mGmAmUGUGCmCGmCAAmCGCUCUmGmCC(L1)GGCAUCG*mU*mU |
| G02307 | 810 | mC*mU*mU*CACCAGGAGAAGCCmGUCACACmGUUGmUmAmGmCUCCCmU(L1)mCmCGUUmGmCUAmCAAU*AAGm |
| 6 | | GmCCmGmUmC(L1)mGmAmUGUGCmCGmCAAmCGCUCUmGmCC(L1)GGCAUCG*mU*mU |
| G02307 | 811 | mC*mU*mU*CACCAGGAGAAGCCGUCAmCACmGUUGmUmAmGmCUCCCmU(L1)mCmCGUUmGmCUAmCAAU*AAGm |
| 7 | | GmCCmGmUmC(L1)mGmAmUGUGCmCGmCAAmCGCUCUmGmCC(L1)GGCAUCG*mU*mU |
| G02307 | 812 | mC*mU*mU*CmACCmAmGGmAGmAAGCCmGUCAmCACmGUUGmUmAmGmCUCCCmU(L1)mCmCGUUmGmCUAmCAA |
| 8 | | U*AAGmGmCCmGmUmC(L1)mGmAmUGUGCmCGmCAAmCGCUCUmGmCC(L1)GGCAUCG*mU*mU |
| G02307 | 813 | mC*mU*mU*mCACCmAmGGmAGmAAGCCmGUCAmCACmGUUGmUmAmGmCUCCCmU(L1)mCmCGUUmGmCUAmCAA |
| 9 | | U*AAGmGmCCmGmUmC(L1)mGmAmUGUGCmCGmCAAmCGCUCUmGmCC(L1)GGCAUCG*mU*mU |
| G02308 | 814 | mC*mU*mU*mCmACCAmGGmAGmAAGCCmGUCAmCACmGUUGmUmAmGmCUCCCmU(L1)mCmCGUUmGmCUAmCAA |
| 0 | | U*AAGmGmCCmGmUmC(L1)mGmAmUGUGCmCGmCAAmCGCUCUmGmCC(L1)GGCAUCG*mU*mU |
| G02308 | 815 | mC*mU*mU*mCmACCmAGGmAGmAAGCCmGUCAmCACmGUUGmUmAmGmCUCCCmU(L1)mCmCGUUmGmCUAmCAA |
| 1 | | U*AAGmGmCCmGmUmC(L1)mGmAmUGUGCmCGmCAAmCGCUCUmGmCC(L1)GGCAUCG*mU*mU |
| G02308 | 816 | mC*mU*mU*mCmACCmAmGGAGmAAGCCmGUCAmCACmGUUGmUmAmGmCUCCCmU(L1)mCmCGUUmGmCUAmCAA |
| 2 | | U*AAGmGmCCmGmUmC(L1)mGmAmUGUGCmCGmCAAmCGCUCUmGmCC(L1)GGCAUCG*mU*mU |
| G02308 | 817 | mC*mU*mU*mCmACCmAmGGmAGAAGCCmGUCAmCACmGUUGmUmAmGmCUCCCmU(L1)mCmCGUUmGmCUAmCAA |
| 3 | | U*AAGmGmCCmGmUmC(L1)mGmAmUGUGCmCGmCAAmCGCUCUmGmCC(L1)GGCAUCG*mU*mU |
| G02308 | 818 | mC*mU*mU*mCmACCmAmGGmAGmAAGCCGUCAmCACmGUUGmUmAmGmCUCCCmU(L1)mCmCGUUmGmCUAmCAA |
| 4 | | U*AAGmGmCCmGmUmC(L1)mGmAmUGUGCmCGmCAAmCGCUCUmGmCC(L1)GGCAUCG*mU*mU |
| G02308 | 819 | mC*mU*mU*mCmACCmAmGGmAGmAAGCCmGUCACACmGUUGmUmAmGmCUCCCmU(L1)mCmCGUUmGmCUAmCAA |
| 5 | | U*AAGmGmCCmGmUmC(L1)mGmAmUGUGCmCGmCAAmCGCUCUmGmCC(L1)GGCAUCG*mU*mU |
| G02308 | 820 | CUUCACCAAGAGAAGCCGUCACACmGUUGmUmAmGmCUCCCmU(L1)mCmCGUUmGmCUAmCAAU*AAGmGmCCmGm |
| 6 | | UmC(L1)mGmAmUGUGCmCGmCAAmCGCUCUmGmCC(L1)GGCAUCG*mU*mU |
| G02308 | 821 | mC*mU*mU*CACCAAGAGAAGCCGUCACACmGUUGmUmAmGmCUCCCmU(L1)mCmCGUUmGmCUAmCAAU*AAGmG |
| 7 | | mCCmGmUmC(L1)mGmAmUGUGCmCGmCAAmCGCUCUmGmCC(L1)GGCAUCG*mU*mU |
| G02308 | 822 | mC*mU*mU*mCACCAAGAGAAGCCGUCACACmGUUGmUmAmGmCUCCCmU(L1)mCmCGUUmGmCUAmCAAU*AAGm |
| 8 | | GmCCmGmUmC(L1)mGmAmUGUGCmCGmCAAmCGCUCUmGmCC(L1)GGCAUCG*mU*mU |
| G02308 | 823 | mC*mU*mU*CmACCAAGAGAAGCCGUCACACmGUUGmUmAmGmCUCCCmU(L1)mCmCGUUmGmCUAmCAAU*AAGm |
| 9 | | GmCCmGmUmC(L1)mGmAmUGUGCmCGmCAAmCGCUCUmGmCC(L1)GGCAUCG*mU*mU |
| G02309 | 824 | mC*mU*mU*CACCAmAGAGAAGCCGUCACACmGUUGmUmAmGmCUCCCmU(L1)mCmCGUUmGmCUAmCAAU*AAGm |
| 0 | | GmCCmGmUmC(L1)mGmAmUGUGCmCGmCAAmCGCUCUmGmCC(L1)GGCAUCG*mU*mU |
| G02309 | 825 | mC*mU*mU*CACCAAGmAGAAGCCGUCACACmGUUGmUmAmGmCUCCCmU(L1)mCmCGUUmGmCUAmCAAU*AAGm |
| 1 | | GmCCmGmUmC(L1)mGmAmUGUGCmCGmCAAmCGCUCUmGmCC(L1)GGCAUCG*mU*mU |
| G02309 | 826 | mC*mU*mU*CACCAAGAGmAAGCCGUCACACmGUUGmUmAmGmCUCCCmU(L1)mCmCGUUmGmCUAmCAAU*AAGm |
| 2 | | GmCCmGmUmC(L1)mGmAmUGUGCmCGmCAAmCGCUCUmGmCC(L1)GGCAUCG*mU*mU |
| G02309 | 827 | mC*mU*mU*CACCAAGAGAAGCCmGUCACACmGUUGmUmAmGmCUCCCmU(L1)mCmCGUUmGmCUAmCAAU*AAGm |
| 3 | | GmCCmGmUmC(L1)mGmAmUGUGCmCGmCAAmCGCUCUmGmCC(L1)GGCAUCG*mU*mU |
| G02309 | 828 | mC*mU*mU*CACCAAGAGAAGCCGUCAmCACmGUUGmUmAmGmCUCCCmU(L1)mCmCGUUmGmCUAmCAAU*AAGm |
| 4 | | GmCCmGmUmC(L1)mGmAmUGUGCmCGmCAAmCGCUCUmGmCC(L1)GGCAUCG*mU*mU |
| G02309 | 829 | mC*mU*mU*CmACCmAmAGmAGmAAGCCmGUCAmCACmGUUGmUmAmGmCUCCCmU(L1)mCmCGUUmGmCUAmCAA |
| 5 | | U*AAGmGmCCmGmUmC(L1)mGmAmUGUGCmCGmCAAmCGCUCUmGmCC(L1)GGCAUCG*mU*mU |
| G02309 | 830 | mC*mU*mU*mCACCmAmAGmAGmAAGCCmGUCAmCACmGUUGmUmAmGmCUCCCmU(L1)mCmCGUUmGmCUAmCA |
| 6 | | AU*AAGmGmCCmGmUmC(L1)mGmAmUGUGCmCGmCAAmCGCUCUmGmCC(L1)GGCAUCG*mU*mU |
| G02309 | 831 | mC*mU*mU*mCmACCAmAGmAGmAAGCCmGUCAmCACmGUUGmUmAmGmCUCCCmU(L1)mCmCGUUmGmCUAmCAA |
| 7 | | U*AAGmGmCCmGmUmC(L1)mGmAmUGUGCmCGmCAAmCGCUCUmGmCC(L1)GGCAUCG*mU*mU |
| G02309 | 832 | mC*mU*mU*mCmACCmAAGmAGmAAGCCmGUCAmCACmGUUGmUmAmGmCUCCCmU(L1)mCmCGUUmGmCUAmCAA |
| 8 | | U*AAGmGmCCmGmUmC(L1)mGmAmUGUGCmCGmCAAmCGCUCUmGmCC(L1)GGCAUCG*mU*mU |
| G02309 | 833 | mC*mU*mU*mCmACCmAmAGAGmAAGCCmGUCAmCACmGUUGmUmAmGmCUCCCmU(L1)mCmCGUUmGmCUAmCAA |
| 9 | | U*AAGmGmCCmGmUmC(L1)mGmAmUGUGCmCGmCAAmCGCUCUmGmCC(L1)GGCAUCG*mU*mU |
| G02310 | 834 | mC*mU*mU*mCmACCmAmAGmAGAAGCCmGUCAmCACmGUUGmUmAmGmCUCCCmU(L1)mCmCGUUmGmCUAmCA |
| 0 | | AU*AAGmGmCCmGmUmC(L1)mGmAmUGUGCmCGmCAAmCGCUCUmGmCC(L1)GGCAUCG*mU*mU |
| G02310 | 835 | mC*mU*mU*mCmACCmAmAGmAGmAAGCCGUCAmCACmGUUGmUmAmGmCUCCCmU(L1)mCmCGUUmGmCUAmCAA |
| 1 | | U*AAGmGmCCmGmUmC(L1)mGmAmUGUGCmCGmCAAmCGCUCUmGmCC(L1)GGCAUCG*mU*mU |
| G02310 | 836 | mC*mU*mU*mCmACCmAmAGmAGmAAGCCmGUCACACmGUUGmUmAmGmCUCCCmU(L1)mCmCGUUmGmCUAmCAA |
| 2 | | U*AAGmGmCCmGmUmC(L1)mGmAmUGUGCmCGmCAAmCGCUCUmGmCC(L1)GGCAUCG*mU*mU |
| G02310 | 837 | CCAAGUGUCUUCCAGUACGAUUUGmGUUGmUmAmGmCUCCCmU(L1)mCmCGUUmGmCUAmCAAU*AAGmGmCCmGm |
| 3 | | UmC(L1)mGmAmUGUGCmCGmCAAmCGCUCUmGmCC(L1)GGCAUCG*mU*mU |
| G02310 | 838 | mC*mC*mA*AGUGUCUUCCAGUACGAUUUGmGUUGmUmAmGmCUCCCmU(L1)mCmCGUUmGmCUAmCAAU*AAGmG |
| 4 | | mCCmGmUmC(L1)mGmAmUGUGCmCGmCAAmCGCUCUmGmCC(L1)GGCAUCG*mU*mU |
| G02310 | 839 | mC*mC*mA*mAGUGUCUUCCAGUACGAUUUGmGUUGmUmAmGmCUCCCmU(L1)mCmCGUUmGmCUAmCAAU*AAGm |
| 5 | | GmCCmGmUmC(L1)mGmAmUGUGCmCGmCAAmCGCUCUmGmCC(L1)GGCAUCG*mU*mU |
| G02310 | 840 | mC*mC*mA*AmGUGUCUUCCAGUACGAUUUGmGUUGmUmAmGmCUCCCmU(L1)mCmCGUUmGmCUAmCAAU*AAGm |
| 6 | | GmCCmGmUmC(L1)mGmAmUGUGCmCGmCAAmCGCUCUmGmCC(L1)GGCAUCG*mU*mU |
| G02310 | 841 | mC*mC*mA*AGUGUmCUUCCAGUACGAUUUGmGUUGmUmAmGmCUCCCmU(L1)mCmCGUUmGmCUAmCAAU*AAGm |
| 7 | | GmCCmGmUmC(L1)mGmAmUGUGCmCGmCAAmCGCUCUmGmCC(L1)GGCAUCG*mU*mU |
| G02310 | 842 | mC*mC*mA*AGUGUCUmUCCAGUACGAUUUGmGUUGmUmAmGmCUCCCmU(L1)mCmCGUUmGmCUAmCAAU*AAGm |
| 8 | | GmCCmGmUmC(L1)mGmAmUGUGCmCGmCAAmCGCUCUmGmCC(L1)GGCAUCG*mU*mU |
| G02310 | 843 | mC*mC*mA*AGUGUCUUCmCAGUACGAUUUGmGUUGmUmAmGmCUCCCmU(L1)mCmCGUUmGmCUAmCAAU*AAGm |
| 9 | | GmCCmGmUmC(L1)mGmAmUGUGCmCGmCAAmCGCUCUmGmCC(L1)GGCAUCG*mU*mU |
| G02311 | 844 | mC*mC*mA*AGUGUCUUCCAGUAmCGAUUUGmGUUGmUmAmGmCUCCCmU(L1)mCmCGUUmGmCUAmCAAU*AAGm |
| 0 | | GmCCmGmUmC(L1)mGmAmUGUGCmCGmCAAmCGCUCUmGmCC(L1)GGCAUCG*mU*mU |
| G02311 | 845 | mC*mC*mA*AGUGUCUUCCAGUACGAUmUUGmGUUGmUmAmGmCUCCCmU(L1)mCmCGUUmGmCUAmCAAU*AAGm |
| 1 | | GmCCmGmUmC(L1)mGmAmUGUGCmCGmCAAmCGCUCUmGmCC(L1)GGCAUCG*mU*mU |
| G02311 | 846 | mC*mC*mA*AmGUGmUmCUmUCmCAGUAmCGAUmUUGmGUUGmUmAmGmCUCCCmU(L1)mCmCGUUmGmCUAmCAA |
| 2 | | U*AAGmGmCCmGmUmC(L1)mGmAmUGUGCmCGmCAAmCGCUCUmGmCC(L1)GGCAUCG*mU*mU |
| G02311 | 847 | mC*mC*mA*mAGUGmUmCUmUCmCAGUAmCGAUmUUGmGUUGmUmAmGmCUCCCmU(L1)mCmCGUUmGmCUAmCAA |
| 3 | | U*AAGmGmCCmGmUmC(L1)mGmAmUGUGCmCGmCAAmCGCUCUmGmCC(L1)GGCAUCG*mU*mU |
| G02311 | 848 | mC*mC*mA*mAmGUGUmCUmUCmCAGUAmCGAUmUUGmGUUGmUmAmGmCUCCCmU(L1)mCmCGUUmGmCUAmCAA |
| 4 | | U*AAGmGmCCmGmUmC(L1)mGmAmUGUGCmCGmCAAmCGCUCUmGmCC(L1)GGCAUCG*mU*mU |
| G02311 | 849 | mC*mC*mA*mAmGUGmUCUmUCmCAGUAmCGAUmUUGmGUUGmUmAmGmCUCCCmU(L1)mCmCGUUmGmCUAmCAA |
| 5 | | U*AAGmGmCCmGmUmC(L1)mGmAmUGUGCmCGmCAAmCGCUCUmGmCC(L1)GGCAUCG*mU*mU |
| G02311 | 850 | mC*mC*mA*mAmGUGmUmCUUCmCAGUAmCGAUmUUGmGUUGmUmAmGmCUCCCmU(L1)mCmCGUUmGmCUAmCAA |
| 6 | | U*AAGmGmCCmGmUmC(L1)mGmAmUGUGCmCGmCAAmCGCUCUmGmCC(L1)GGCAUCG*mU*mU |
| G02311 | 851 | mC*mC*mA*mAmGUGmUmCUmUCCAGUAmCGAUmUUGmGUUGmUmAmGmCUCCCmU(L1)mCmCGUUmGmCUAmCAA |
| 7 | | U*AAGmGmCCmGmUmC(L1)mGmAmUGUGCmCGmCAAmCGCUCUmGmCC(L1)GGCAUCG*mU*mU |
| G02311 | 852 | mC*mC*mA*mAmGUGmUmCUmUCmCAGUACGAUmUUGmGUUGmUmAmGmCUCCCmU(L1)mCmCGUUmGmCUAmCAA |
| 8 | | U*AAGmGmCCmGmUmC(L1)mGmAmUGUGCmCGmCAAmCGCUCUmGmCC(L1)GGCAUCG*mU*mU |
| G02311 | 853 | mC*mC*mA*mAmGUGmUmCUmUCmCAGUAmCGAUUUGmGUUGmUmAmGmCUCCCmU(L1)mCmCGUUmGmCUAmCAA |
| 9 | | U*AAGmGmCCmGmUmC(L1)mGmAmUGUGCmCGmCAAmCGCUCUmGmCC(L1)GGCAUCG*mU*mU |
| G02312 | 854 | mC*mU*mU*CACCmAGGAGAAGCCGUCACACmGUUGmUmAmGmCUCCCmU(L1)mCmCGUUmGmCUAmCAAU*AAGm |
| 0 | | GmCCmGmUmC(L1)mGmAmUGUGCmCGmCAAmCGCUCUmGmCC(L1)GGCAUCG*mU*mU |
| G02312 | 855 | mC*mU*mU*CACCmAAGAGAAGCCGUCACACmGUUGmUmAmGmCUCCCmU(L1)mCmCGUUmGmCUAmCAAU*AAGm |
| 1 | | GmCCmGmUmC(L1)mGmAmUGUGCmCGmCAAmCGCUCUmGmCC(L1)GGCAUCG*mU*mU |
| G02312 | 856 | mC*mC*mA*AGUGmUCUUCCAGUACGAUUUGmGUUGmUmAmGmCUCCCmU(L1)mCmCGUUmGmCUAmCAAU*AAGm |
| 2 | | GmCCmGmUmC(L1)mGmAmUGUGCmCGmCAAmCGCUCUmGmCC(L1)GGCAUCG*mU*mU |
| TR0182 | 857 | mC*mG*mA*UGAGAACCGUUGCUACAAUAAGGCCGUCUGAAAAGAUGUGCCGCAACGCUCUGCCCUUAAGCUUCUGC |
| 27 | | UUAAGGGCAUCGUUU*mA*mU*mU |
| TR0182 | 858 | mC*mG*mA*UGAGAACCGUUGCUACAAUAAGGCCGUCGAAAGAUGUGCCGCAACGCUCUGCCCUUAAGCUUCUGCUU |
| 28 | | AAGGGCAUCGUUU*mA*mU*mU |
| TR0182 | 859 | mC*mG*mA*UGAGAACCGUUGCUACAAUAAGGCCGUGAAAAUGUGCCGCAACGCUCUGCCCUUAAGCUUCUGCUUAA |
| 29 | | GGGCAUCGUUU*mA*mU*mU |
| TR0182 | 860 | mC*mG*mA*UGAGAACCGUUGCUACAAUAAGGCCGGAAAUGUGCCGCAACGCUCUGCCCUUAAGCUUCUGCUUAAGG |
| 30 | | GCAUCGUUU*mA*mU*mU |
| TR0182 | 861 | mC*mG*mA*UGAGAACCGUUGCUACAAUAAGGCCGAAAGUGCCGCAACGCUCUGCCCUUAAGCUUCUGCUUAAGGGC |
| 31 | | AUCGUUU*mA*mU*mU |
| TR0182 | 862 | mC*mG*mA*UGAGAACCGUUGCUACAAUAAGGCCGUCUGAAAAGAUGUGCCGCAACGCUCUGCCCUUAAGUUCUCUU |
| 32 | | AAGGGCAUCGUUU*mA*mU*mU |
| TR0182 | 863 | mC*mG*mA*UGAGAACCGUUGCUACAAUAAGGCCGUCUGAAAAGAUGUGCCGCAACGCUCUGCCCUUAAUUCUUUAA |
| 33 | | GGGCAUCGUUU*mA*mU*mU |
| TR0182 | 864 | mC*mG*mA*UGAGAACCGUUGCUACAAUAAGGCCGUCUGAAAAGAUGUGCCGCAACGCUCUGCCCUUAUUCUUAAGG |
| 34 | | GCAUCGUUU*mA*mU*mU |
| TR0182 | 865 | mC*mG*mA*UGAGAACCGUUGCUACAAUAAGGCCGUCUGAAAAGAUGUGCCGCAACGCUCUGCCCUUUUCUAAGGGC |
| 35 | | AUCGUUU*mA*mU*mU |
| TR0182 | 866 | mC*mG*mA*UGAGAACCGUUGCUACAAUAAGGCCGUCUGAAAAGAUGUGCCGCAACGCUCUGCCCUUUCUAGGGCAU |
| 36 | | CGUUU*mA*mU*mU |
| TR0182 | 867 | mC*mG*mA*UGAGAACCGUUGCUACAAUAAGGCCGUCUGAAAAGAUGUGCCGCAACGCUCUGCCCUUCUGGGCAUCG |
| 37 | | UUU*mA*mU*mU |
| TR0182 | 868 | mC*mG*mA*UGAGAACCGUUGCUACAAUAAGGCCGUCUGAAAAGAUGUGCCGCAACGCUCUGCCUUCUGGCAUCGUU |
| 38 | | U*mA*mU*mU |
| TR0182 | 869 | mC*mG*mA*UGAGAACCGUUGCUACAAUAAGGCCGUCUGAAAAGAUGUGCCGCAACGCUCUGCUUCUGCAUCGUUU* |
| 39 | | mA*mU*mU |
| TR0182 | 870 | mC*mG*mA*UGAGAACCGUUGCUACAAUAAGGCCGUCUGAAAAGAUGUGCCGCAACGCUCUGUUCUCAUCGUUU*mA |
| 40 | | *mU*mU |
| TR0182 | 871 | mC*mG*mA*UGAGAACCGUUGCUACAAUAAGGCCGUGAAAAUGUGCCGCAACGCUCUGCCUUCUGGCAUCGUUU*mA |
| 41 | | *mU*mU |
| TR0182 | 872 | mC*mG*mA*UGAGAACCGUUGCUACAAUAAGGCCGUCUGAAAAGAUGUGCCGCAACGCUCUGCCCUUAAGCUUCUGC |
| 42 | | UUAAGGGCAUCG*mU*mU*mU |
| CR0186 | 873 | mA*mC*mU*mCmACUmCmAmCmCCmACmACmAmGACAmCAmCmGUUmGmUmAmGmCmUCCCmU*mU*mU*mC*mU*m |
| 48 | | C*mA*mU*mC*mG |
| CR0186 | 874 | mG*mU*mG*mUmGUCmCmCmUmCUmCCmCCmAmCCCGmUCmCmGUUmGmUmAmGmCmUCCCmU*mU*mU*mC*U*mC |
| 56 | | *mA*mU*mC*mG |
| CR0184 | 875 | mG*mU*mG*UGUCCCUCUCCCCACCCGUCCGUUGUAGCUCCCUUUCUCA*mU*mC*mG |
| 73 | | |
| CR0184 | 876 | mG*mU*mG*UGUCCCUCCACCCGUCCmGUUGmUmAmGmCmUCCCmUmUmUmCmUmCmA*mU*mC*mG |
| 74 | | |
| CR0184 | 877 | mG*mU*mG*mUmGmUCCCmUmCmUmCmCCCmAmCCCGmUCCGUUGUAGCUCCCUUUCUCA*mU*mC*mG |
| 75 | | |
| CR0184 | 878 | mG*mU*mG*mUmGmUCCCmUmCmUmCmCCCmAmCCCGmUCCmGUUGmUmAmGmCmUCCCmUmUmUmCmUmCmA*mU* |
| 76 | | mC*mG |
| TR0184 | 879 | mC*mG*mA*UGAGAACCGUUGCUACAAUAAGGCCGUCUmGmAmAmAAGAUGUGCCGCAACGCUCUGCCCUUAAGCmU |
| 77 | | mUmCmUGCUUAAGGGCAUCGUU*mU*mA*mU |
| TR0184 | 880 | mC*mG*mA*UGAGAACCGUUGCUACAAUAAGGCCGUCUmGmAmAmAAGAUGUGCCGCAACGCUCUGCCCUUAAGCmG |
| 78 | | mAmAmAGCUUAAGGGCAUCGUU*mU*mA*mU |
| TR0184 | 881 | mCmGmAUGAGAACCGUUGCUACAAUAAGGCCGUCUmGmAmAmAAGAUGUGCCGCAACGCUCUGCCCUUAAGCmUmUm |
| 79 | | CmUGCUUAAGGGCAUCGUUmUmAmU |
| TR0184 | 882 | mC*mG*mA*UGAGAAAGGUUGCUACAAUAAGGCCGUCUmGmAmAmAAGAUGUGCCGCAACGCUCUGCCCUUAAGCmU |
| 80 | | mUmCmUGCUUAAGGGCAUCGUU*mU*mA*mU |
| TR0184 | 883 | mC*mG*mA*UGAGAACCGUUGCUACAAUAAGGCCGUCUmGmAmAmAAGAUGUGCCGCAACGCUCUGCCCUUAAGCmU |
| 81 | | mUmCmUGCUUAAGGGCAUCGU*U*mU*mU |
| TR0184 | 884 | mC*mG*mA*UGAGAACCGUUGCUACAAUAAGGCCGUCUmGmAmAmAAGAUGUGCCGCAACGCUCUGCCCUUAAGCmU |
| 82 | | mUmCmUGCUUAAGGGCAUCGU*mU*mU*mU |
| TR0184 | 885 | mC*mG*mA*UGAGAACCGUUGCUACAAUAAGGCCGUCUmGmAmAmAAGAUGUGCCGCAACGCUCUGCCCUUAAGCmU |
| 83 | | mUmCmUGCUUAAGGGCAUCG*mU*mU*mU |
| TR0184 | 886 | mC*mG*mA*mUmGmAmGmAmAmCmCGUUGmCUACAAmUAAGmGmCmCmGmUmCmUmGmAmAmAmAmGmAmUGUmGmC |
| 84 | | mCGCAmAmCmGmCmUmCmUmGmCmCCmUmUmAmAmGmCmUmUmCmUmGmCmUmUmAmAGmGmGCAUCGmUmU*mU*m |
| | | A*mU |
| TR0184 | 887 | mC*mG*mA*mUmGmAmGmAmAmAmGGUUGmCUACAAmUAAGmGmCmCmGmUmCmUmGmAmAmAmAmGmAmUGUmGmC |
| 85 | | mCGCAmAmCmGmCmUmCmUmGmCmCCmUmUmAmAmGmCmUmUmCmUmGmCmUmUmAmAGmGmGCAUCGmUmU*mU*m |
| | | A*mU |
| TR0184 | 888 | mC*mG*mA*mUmGmAmGmAmAmCmCGUUGmCUACAAmUAAGmGmCmCmGmUmCmUmGmAmAmAmAmGmAmUGUmGmC |
| 86 | | mCGCAmAmCmGmCmUmCmUmGmCmCCmUmUmAmAmGmCmUmUmCmUmGmCmUmUmAmAGmGmGCAUCG*mU*mU*mU |
| TR0184 | 889 | mC*mG*mA*mUmGmAmGmAmAmCmCGUUGmCUACAAmUAAGmGmCmCmGmUmCmGmAmAmAmGmAmUGUmGmCmCGC |
| 87 | | AmAmCmGmCmUmCmUmGmCmCCmUmUmCmUmGmGCAUCGmUmU*mU*mA*mU |
| TR0184 | 890 | mC*mG*mA*mUmGmAmGmAmAmCmCGUUGmCUACAAmUAAGmGmCmCmGmUmCmGmAmAmAmGmAmUGUmGmCmCGC |
| 88 | | AmAmCmGmCmUmCmUmGmCmCCmUmUmCmUmGmGCAUCG*mU*mU*mU |
| TR0184 | 891 | mC*mG*mA*mUmGmAmGmAmAmCmCGUUGmCUACAAmUAAGGCCGUCUmGmAmAmAAGAUGUGCCGCAACGCUCUGC |
| 89 | | CCUUAAGCmUmUmCmUGCUUAAGGGCAUCGUU*mU*mA*mU |
| TR0184 | 892 | mC*mG*mA*UGAGAACCGUUGCUACAAUAAGmGmCmCmGmUmCmUmGmAmAmAmAmGmAmUGUmGmCmCGCAACGCU |
| 90 | | CUGCCCUUAAGCmUmUmCmUGCUUAAGGGCAUCGUU*mU*mA*mU |
| TR0184 | 893 | mC*mG*mA*UGAGAACCGUUGCUACAAUAAGGCCGUCUmGmAmAmAAGAUGUGCCGCAmAmCmGmCmUmCmUmGmCm |
| 91 | | CCmUmUmAmAmGmCmUmUmCmUmGmCmUmUmAmAGmGmGCAUCGmUmU*mU*mA*mU |
| TR0184 | 894 | mC*mG*mA*mUmGmAmGmAmAmCmCGUUGmCUACAAmUAAGmGmCmCmGmUmCmUmGmAmAmAmAmGmAmUGUmGmC |
| 92 | | mCGCAACGCUCUGCCCUUAAGCmUmUmCmUGCUUAAGGGCAUCGUU*mU*mA*mU |
| TR0184 | 895 | mC*mG*mA*mUmGmAmGmAmAmCmCGUUGmCUACAAmUAAGGCCGUCUmGmAmAmAAGAUGUGCCGCAmAmCmGmCm |
| 93 | | UmCmUmGmCmCCmUmUmAmAmGmCmUmUmCmUmGmCmUmUmAmAGmGmGCAUCGmUmU*mU*mA*mU |
| TR0184 | 896 | mC*mG*mA*UGAGAACCGUUGCUACAAUAAGmGmCmCmGmUmCmUmGmAmAmAmAmGmAmUGUmGmCmCGCAmAmCm |
| 94 | | GmCmUmCmUmGmCmCCmUmUmAmAmGmCmUmUmCmUmGmCmUmUmAmAGmGmGCAUCGmUmU*mU*mA*mU |
| TR0184 | 897 | mC*mG*mA*mUmGmAmGmAmAmCmCGUUmGmCUACAmAmUAAGGCCGUCUmGmAmAmAAGAUGUGCCGCAACGCUCU |
| 95 | | GCCCUUAAGCmUmUmCmUGCUUAAGGGCAUCGUU*mU*mA*mU |
| TR0184 | 898 | mC*mG*mA*UGAGAACCGUUGCUACAAUAmAGmGmCmCmGmUmCmUmGmAmAmAmAmGmAmUGmUmGmCmCmGmCAA |
| 96 | | CGCUCUGCCCUUAAGCmUmUmCmUGCUUAAGGGCAUCGUU*mU*mA*mU |
| TR0184 | 899 | mC*mG*mA*UGAGAACCGUUGCUACAAUAAGGCCGUCUmGmAmAmAAGAUGUGCCGCmAmAmCmGmCmUmCmUmGmC |
| 97 | | mCmCmUmUmAmAmGmCmUmUmCmUmGmCmUmUmAmAGmGmGCmAmUmCmGmUmU*mU*mA*mU |
| TR0184 | 900 | mC*mG*mA*mUmGmAmGmAmAmCmCGUUmGmCUACAmAmUAmAGmGmCmCmGmUmCmUmGmAmAmAmAmGmAmUGmU |
| 98 | | mGmCmCGmCAACGCUCUGCCCUUAAGCmUmUmCmUGCUUAAGGGCAUCGUU*mU*mA*mU |
| TR0184 | 901 | mC*mG*mA*mUmGmAmGmAmAmCmCGUUmGmCUACAmAmUAAGGCCGUCUmGmAmAmAAGAUGUGCCGCmAmAmCmG |
| 99 | | mCmUmCmUmGmCmCmCmUmUmAmAmGmCmUmUmCmUmGmCmUmUmAmAGmGmGCmAmUmCmGmUmU*mU*mA*mU |
| TR0185 | 902 | mC*mG*mA*UGAGAACCGUUGCUACAAUAmAGmGmCmCmGmUmCmUmGmAmAmAmAmGmAmUGmUmGmCmCGmCmAm |
| 00 | | AmCmGmCmUmCmUmGmCmCmCmUmUmAmAmGmCmUmUmCmUmGmCmUmUmAmAGmGmGCmAmUmCmGmUmU*mU*mA |
| | | *mU |
| G02749 | 903 | mC*mC*mA*mAmGUGmUmCUmUCmCAGUAmCGAUmUUGmGUUGmUmAmGmCUCCCmUmUmCmGmAmAmAmGmAmCmC |
| 2 | | GUUmGmCUAmCAAU*AAGmGmCCmGmUmCmGmAmAmAmGmAmUGUGCmCGmCAAmCGCUCUmGmCCmUmUmCmUGGC |
| | | AUCG*mU*mU |
| G02749 | 904 | mC*mC*mA*mAmGUGmUmCUmUCmCAGUAmCGAUmUUGmGUUGmUmAmGmCUCCCmUmUmCmGmAmAmAmGmAmCmC |
| 3 | | GUUmGmCUAmCAAU*AAGmGmCCmGmUmGmAmAmAmAmUGUGCmCGmCAAmCGCUCUmGmCCmUmUmCmUGGCAUCG |
| | | *mU*mU |
| G02749 | 905 | mC*mC*mA*mAmGUGmUmCUmUCmCAGUAmCGAUmUUGmGUUGmUmAmGmCUCCCmUmUmCmGmAmAmAmGmAmCmC |
| 4 | | GUUmGmCUAmCAAU*AAGmGmCCmGmGmAmAmAmUGUGCmCGmCAAmCGCUCUmGmCCmUmUmCmUGGCAUCG*mU* |
| | | mU |
| G02749 | 906 | mC*mC*mA*mAmGUGmUmCUmUCmCAGUAmCGAUmUUGmGUUGmUmAmGmCUCCCmUmUmCmGmAmAmAmGmAmCmC |
| 5 | | GUUmGmCUAmCAAU*AAGmGmCCmGmAmAmAGUGCmCGmCAAmCGCUCUmGmCCmUmUmCmUGGCAUCG*mU*mU |
| G02749 | 907 | mC*mC*mA*mAmGUGmUmCUmUCmCAGUAmCGAUmUUGmGUUGmUmAmGmCUCCCmUmGmAmAmAmCmCGUUmGmCU |
| 6 | | AmCAAU*AAGmGmCCmGmAmAmAGUGCmCGmCAAmCGCUCUmGmCCmUmUmCmUGGCAUCG*mU*mU |
| G02410 | 908 | mC*mA*mA*mGmUCUmGmUCmUGmCCUAUmUCACmCGAmGUUGmUmAmGmCUCCCmU(L1)mCmCGUUmGmCUAmCA |
| 3 | | AU*AAGmGmCCmGmUmC(L1)mGmAmUGUGCmCGmCAAmCGCUCUmGmCC(L1)GGCAUCG*mU*mU |
| G02410 | 909 | mG*mG*mU*mGmAAUmAmGGmCAmGACAGmACUUmGUCmGUUGmUmAmGmCUCCCmU(L1)mCmCGUUmGmCUAmCA |
| 4 | | AU*AAGmGmCCmGmUmC(L1)mGmAmUGUGCmCGmCAAmCGCUCUmGmCC(L1)GGCAUCG*mU*mU |
| G02410 | 910 | mG*mA*mU*mUmAAAmCmCCmGGmCCACUmUUCAmGGAmGUUGmUmAmGmCUCCCmU(L1)mCmCGUUmGmCUAmCA |
| 8 | | AU*AAGmGmCCmGmUmC(L1)mGmAmUGUGCmCGmCAAmCGCUCUmGmCC(L1)GGCAUCG*mU*mU |
| G02410 | 911 | mC*mA*mG*mUmGACmAmAGmUCmUGUCUmGCCUmAUUmGUUGmUmAmGmCUCCCmU(L1)mCmCGUUmGmCUAmCA |
| 9 | | AU*AAGmGmCCmGmUmC(L1)mGmAmUGUGCmCGmCAAmCGCUCUmGmCC(L1)GGCAUCG*mU*mU |
| G02411 | 912 | mG*mU*mU*mGmAAGmGmCGmUUmUGCACmAUGCmAAAmGUUGmUmAmGmCUCCCmU(L1)mCmCGUUmGmCUAmCA |
| 0 | | AU*AAGmGmCCmGmUmC(L1)mGmAmUGUGCmCGmCAAmCGCUCUmGmCC(L1)GGCAUCG*mU*mU |
| G02411 | 913 | mU*mC*mC*mUmGUGmAmUGmUCmAAGCUmGGUCmGAGmGUUGmUmAmGmCUCCCmU(L1)mCmCGUUmGmCUAmCA |
| 1 | | AU*AAGmGmCCmGmUmC(L1)mGmAmUGUGCmCGmCAAmCGCUCUmGmCC(L1)GGCAUCG*mU*mU |
| G02411 | 914 | mC*mA*mG*mGmUUUmUmGAmAAmGUUUAmGGUUmCGUmGUUGmUmAmGmCUCCCmU(L1)mCmCGUUmGmCUAmCA |
| 2 | | AU*AAGmGmCCmGmUmC(L1)mGmAmUGUGCmCGmCAAmCGCUCUmGmCC(L1)GGCAUCG*mU*mU |
| G02411 | 915 | mA*mU*mC*mAmGAAmUmCCmUUmACUUUmGUGAmCACmGUUGmUmAmGmCUCCCmU(L1)mCmCGUUmGmCUAmCA |
| 3 | | AU*AAGmGmCCmGmUmC(L1)mGmAmUGUGCmCGmCAAmCGCUCUmGmCC(L1)GGCAUCG*mU*mU |
| G02411 | 916 | mG*mA*mA*mGmUCCmAmUAmGAmCCUCAmUGUCmUAGmGUUGmUmAmGmCUCCCmU(L1)mCmCGUUmGmCUAmCA |
| 4 | | AU*AAGmGmCCmGmUmC(L1)mGmAmUGUGCmCGmCAAmCGCUCUmGmCC(L1)GGCAUCG*mU*mU |
| G02884 | 917 | mU*mG*mU*mCmUGCmCmUAmUUmCACCGmAUUUmUGAmGUUGmUmAmGmCUCCCmUmGmAmAmAmCmCGUUmGmCU |
| 4 | | AmCAAU*AAGmGmCCmGmUmCmGmAmAmAmGmAmUGUGCmCGmCAAmCGCUCUmGmCCmUmUmCmUGGCAUCG*mU* |
| | | mU |
| G02884 | 918 | mU*mG*mC*mCmUAUmUmCAmCCmGAUUUmUGAUmUCUmGUUGmUmAmGmCUCCCmUmGmAmAmAmCmCGUUmGmCU |
| 5 | | AmCAAU*AAGmGmCCmGmUmCmGmAmAmAmGmAmUGUGCmCGmCAAmCGCUCUmGmCCmUmUmCmUGGCAUCG*mU* |
| | | mU |
| G02884 | 919 | mC*mG*mA*mUmUUUmGmAUmUCmUCAAAmCAAAmUGUmGUUGmUmAmGmCUCCCmUmGmAmAmAmCmCGUUmGmCU |
| 6 | | AmCAAU*AAGmGmCCmGmUmCmGmAmAmAmGmAmUGUGCmCGmCAAmCGCUCUmGmCCmUmUmCmUGGCAUCG*mU* |
| | | mU |
| G02884 | 920 | mG*mU*mA*mAmGGAmUmUCmUGmAUGUGmUAUAmUCAmGUUGmUmAmGmCUCCCmUmGmAmAmAmCmCGUUmGmCU |
| 7 | | AmCAAU*AAGmGmCCmGmUmCmGmAmAmAmGmAmUGUGCmCGmCAAmCGCUCUmGmCCmUmUmCmUGGCAUCG*mU* |
| | | mU |
| G02884 | 921 | mA*mG*mA*mGmCAAmCmAGmUGmCUGUGmGCCUmGGAmGUUGmUmAmGmCUCCCmUmGmAmAmAmCmCGUUmGmCU |
| 8 | | AmCAAU*AAGmGmCCmGmUmCmGmAmAmAmGmAmUGUGCmCGmCAAmCGCUCUmGmCCmUmUmCmUGGCAUCG*mU* |
| | | mU |
| G02884 | 922 | mU*mG*mG*mAmGCAmAmCAmAAmUCUGAmCUUUmGCAmGUUGmUmAmGmCUCCCmUmGmAmAmAmCmCGUUmGmCU |
| 9 | | AmCAAU*AAGmGmCCmGmUmCmGmAmAmAmGmAmUGUGCmCGmCAAmCGCUCUmGmCCmUmUmCmUGGCAUCG*mU* |
| | | mU |
| G02885 | 923 | mA*mU*mG*mCmUGUmUmGUmUGmAAGGCmGUUUmGCAmGUUGmUmAmGmCUCCCmUmGmAmAmAmCmCGUUmGmCU |
| 0 | | AmCAAU*AAGmGmCCmGmUmCmGmAmAmAmGmAmUGUGCmCGmCAAmCGCUCUmGmCCmUmUmCmUGGCAUCG*mU* |
| | | mU |
| G02885 | 924 | mU*mU*mU*mUmGAAmAmGUmUUmAGGUUmCGUAmUCUmGUUGmUmAmGmCUCCCmUmGmAmAmAmCmCGUUmGmCU |
| 1 | | AmCAAU*AAGmGmCCmGmUmCmGmAmAmAmGmAmUGUGCmCGmCAAmCGCUCUmGmCCmUmUmCmUGGCAUCG*mU* |
| | | mU |
| G02885 | 925 | mU*mU*mA*mCmUUUmGmUGmACmACAUUmUGUUmUGAmGUUGmUmAmGmCUCCCmUmGmAmAmAmCmCGUUmGmCU |
| 2 | | AmCAAU*AAGmGmCCmGmUmCmGmAmAmAmGmAmUGUGCmCGmCAAmCGCUCUmGmCCmUmUmCmUGGCAUCG*mU* |
| | | mU |
| G02885 | 926 | mG*mA*mU*mUmAAAmCmCCmGGmCCACUmUUCAmGGAmGUUGmUmAmGmCUCCCmUmGmAmAmAmCmCGUUmGmCU |
| 3 | | AmCAAU*AAGmGmCCmGmUmCmGmAmAmAmGmAmUGUGCmCGmCAAmCGCUCUmGmCCmUmUmCmUGGCAUCG*mU* |
| | | mU |
| G02146 | 927 | mA*mU*mA*mUmCCAmGmAAmCCmCUGACmCCUGmCCGmGUUGmUmAmGmCUCCCmUmGmAmAmAmCmCGUUmGmCU |
| 9 | | AmCAAU*AAGmGmCCmGmUmCmGmAmAmAmGmAmUGUGCmCGmCAAmCGCUCUmGmCCmUmUmCmUGGCAUCG*mU* |
| | | mU |
| G02473 | 928 | mA*mG*mG*mAmCCAmGmCCmUCmAGACAmCAAAmUACmGUUGmUmAmGmCUCCCmUmGmAmAmAmCmCGUUmGmCU |
| 9 | | AmCAAU*AAGmGmCCmGmUmCmGmAmAmAmGmAmUGUGCmCGmCAAmCGCUCUmGmCCmUmUmCmUGGCAUCG*mU* |
| | | mU |
| G02474 | 929 | mC*mU*mG*mCmCUCmGmGAmCGmGCAUCmUAGAmACUmGUUGmUmAmGmCUCCCmUmGmAmAmAmCmCGUUmGmCU |
| 1 | | AmCAAU*AAGmGmCCmGmUmCmGmAmAmAmGmAmUGUGCmCGmCAAmCGCUCUmGmCCmUmUmCmUGGCAUCG*mU* |
| | | mU |
| G02474 | 930 | mA*mG*mG*mCmAGAmGmGAmGGmAGCAGmACGAmUGAmGUUGmUmAmGmCUCCCmUmGmAmAmAmCmCGUUmGmCU |
| 3 | | AmCAAU*AAGmGmCCmGmUmCmGmAmAmAmGmAmUGUGCmCGmCAAmCGCUCUmGmCCmUmUmCmUGGCAUCG*mU* |
| | | mU |
| G02937 | 931 | mC*mC*mA*mAmGUGmUmCUmUCmCAGUAmCGAUmUUGmGUUGmUmAmGmCUCCCmUmGmAmAmAmCmCGUUmGmCU |
| 7 | | AmCAAUAAGmGmCCmGmUmCmGmAmAmAmGmAmUGUGCmCGmCAAmCGCUCUmGmCCmUmUmCmUGGCAUCG*mU*m |
| | | U |
| G02937 | 932 | mC*mC*mA*mAmGUGmUmCUmUCmCAGUAmCGAUmUUGmGUUGmUmAmGmCUCCCmUmGmAmAmAmCmCGUUmGmCU |
| 8 | | AmCmAmAUAAGmGmCCmGmUmCmGmAmAmAmGmAmUGUGCmCGmCAAmCGCUCUmGmCCmUmUmCmUGGCAUCG*mU |
| | | *mU |
| G02937 | 933 | mC*mC*mA*mAmGUGmUmCUmUCmCAGUAmCGAUmUUGmGUUGmUmAmGmCUCCCmUmGmAmAmAmCmCGUUmGmCU |
| 9 | | AmCAmAUAAGmGmCCmGmUmCmGmAmAmAmGmAmUGUGCmCGmCAAmCGCUCUmGmCCmUmUmCmUGGCAUCG*mU* |
| | | mU |
| G02938 | 934 | mC*mC*mA*mAmGUGmUmCUmUCmCAGUAmCGAUmUUGmGUUGmUmAmGmCUCCCmUmGmAmAmAmCmCGUUmGmCU |
| 0 | | AmCmAmAU*AAGmGmCCmGmUmCmGmAmAmAmGmAmUGUGCmCGmCAAmCGCUCUmGmCCmUmUmCmUGGCAUCG*m |
| | | U*mU |
| G02938 | 935 | mC*mC*mA*mAmGUGmUmCUmUCmCAGUAmCGAUmUUGmGUUGmUmAmGmCUCCCmUmGmAmAmAmCmCGUUmGmCU |
| 1 | | AmCAAdTAAGmGmCCmGmUmCmGmAmAmAmGmAmUGUGCmCGmCAAmCGCUCUmGmCCmUmUmCmUGGCAUCG*mU* |
| | | mU |
| G02938 | 936 | mC*mC*mA*mAmGUGmUmCUmUCmCAGUAmCGAUmUUGmGUUGmUmAmGmCUCCCmUmGmAmAmAmCmCGUUmGmCU |
| 2 | | AmCAAU*AAGmGmCCmGmUmCmGmAmAmAmGmAmUGUGCmCGmCAAmCmGCUCUmGmCCmUmUmCmUGGCAUCG*mU |
| | | *mU |
| G02938 | 937 | mC*mC*mA*mAmGUGmUmCUmUCmCAGUAmCGAUmUUGmGUUGmUmAmGmCUCCCmUmGmAmAmAmCmCGUUmGmCU |
| 3 | | AmCAAU*AAGmGmCCmGmUmCmGmAmAmAmGmAmUGUGCmCGmCAAmCGCUCmUmGmCCmUmUmCmUGGCAUCG*mU |
| | | *mU |
| G02938 | 938 | mC*mC*mA*mAmGUGmUmCUmUCmCAGUAmCGAUmUUGmGUUGmUmAmGmCUCCCmUmGmAmAmAmCmCGUUmGmCU |
| 4 | | AmCAAU*AAGmGmCCmGmUmCmGmAmAmAmGmAmUGUGCmCGmCAAmCGmCmUmCmUmGmCCmUmUmCmUGGCAUCG |
| | | *mU*mU |
| G02938 | 939 | mC*mC*mA*mAmGUGmUmCUmUCmCAGUAmCGAUmUUGmGUUGmUmAmGmCUCCCmUmGmAmAmAmCmCGUUmGmCU |
| 5 | | AmCAAU*AAGmGmCCmGmUmCmGmAmAmAmGmAmUGUGCmCGmCAAmCGmCmUmCUmGmCCmUmUmCmUGGCAUCG* |
| | | mU*mU |
| G02938 | 940 | mC*mC*mA*mAmGUGmUmCUmUCmCAGUAmCGAUmUUGmGUUGmUmAmGmCUCCCmUmGmAmAmAmCmCGUUmGmCU |
| 6 | | AmCAAU*AAGmGmCCmGmUmCmGmAmAmAmGmAmUGUGCmCGmCAAmCmGmCmUmCmUmGmCCmUmUmCmUGGCAUC |
| | | G*mU*mU |
| G02938 | 941 | mC*mC*mA*mAmGUGmUmCUmUCmCAGUAmCGAUmUUGmGUUGmUmAmGmCUCCCmUmGmAmAmAmCmCGUUmGmCU |
| 7 | | AmCAAU*AAGmGmCCmGmUmCmGmAmAmAmGmAmUGUGCmCGmCmAmAmCmGmCmUmCmUmGmCmCmUmUmCmUGGC |
| | | AUCG*mU*mU |
| G02938 | 942 | mC*mC*mA*mAmGUGmUmCUmUCmCAGUAmCGAUmUUGmGUUGmUmAmGmCUCCCmUmGmAmAmAmCmCGUUmGmCU |
| 8 | | AmCAAU*AAGmGmCCmGmUmCmGmAmAmAmGmAmUGUGCmCGmCAAmCGCUCUmGmCCmUmUmCmUGGCAUmCmG*m |
| | | U*mU |
| G02938 | 943 | mC*mC*mA*mAmGUGmUmCUmUCmCAGUAmCGAUmUUGmGUUGmUmAmGmCUCCCmUmGmAmAmAmCmCGUUmGmCU |
| 9 | | AmCAAU*AAGmGmCCmGmUmCmGmAmAmAmGmAmUGUGCmCGmCAAmCGCUCUmGmCCmUmUmCmUGGCmAmUmCmG |
| | | *mU*mU |
| G02939 | 944 | mC*mC*mA*mAmGUGmUmCUmUCmCAGUAmCGAUmUUGmGUUGmUmAmGmCUCCCmUmGmAmAmAmCmCGUUmGmCU |
| 0 | | AmCAAU*AAGmGmCCmGmUmCmGmAmAmAmGmAmUGUGCmCGmCmAmAmCmGmCmUmCmUmGmCmCmUmUmCmUGGC |
| | | mAmUmCmG*mU*mU |
| G02939 | 945 | mC*mC*mA*mAmGUGmUmCUmUCmCAGUAmCGAUmUUGmGUUGmUmAmGmCUCCCmUmGmAmAmAmCmCGUUmGmCU |
| 1 | | AmCAAU*AAGmGmCCmGmUmCmGmAmAmAmGmAmUGUGCmCGmCmAmAmCmGmCmUmCmUmGmCmCmUmUmCmUGGC |
| | | AUmCmG*mU*mU |
| G02939 | 946 | mC*mC*mA*mAmGUGmUmCUmUCmCAGUAmCGAUmUUGmGUUGmUmAmGmCUCCCmUmGmAmAmAmCmCGUUmGmCU |
| 2 | | AmCAAU*AAGmGmCCmGmUmCmGmAmAmAmGmAmUGUGCmCGmCAAmCmGmCmUmCmUmGmCCmUmUmCmUGGCAUm |
| | | CmG*mU*mU |
| G02473 | 947 | AGGACCAGCCUCAGACACAAAUACGUUGUAGCUCCCUGAAACCGUUGCUACAAUAAGGCCGUCGAAAGAUGUGCCGC |
| 9 | | AACGCUCUGCCUUCUGGCAUCGUU |
| G02474 | 948 | CUGCCUCGGACGGCAUCUAGAACUGUUGUAGCUCCCUGAAACCGUUGCUACAAUAAGGCCGUCGAAAGAUGUGCCGC |
| 1 | | AACGCUCUGCCUUCUGGCAUCGUU |
| G02474 | 949 | AGGCAGAGGAGGAGCAGACGAUGAGUUGUAGCUCCCUGAAACCGUUGCUACAAUAAGGCCGUCGAAAGAUGUGCCGC |
| 3 | | AACGCUCUGCCUUCUGGCAUCGUU |

[0953] It is understood that if a DNA sequence (comprising Ts) is referenced herein with respect to an RNA, then Ts should be replaced with Us (which may be modified or unmodified depending on the context), and vice versa.

[0954] Nucleotide modifications are indicated in Table 4 as follows: m: 2′-OMe; *: PS linkage; f: 2′-fluoro; (invd): inverted abasic; moe: 2′-moe; e: ENA; d: deoxyribonucleotide (also note that T is always a deoxyribonucleotide); x: UNA. In the sgRNA modified sequences, in certain embodiments, each A, C, G, U, and N is independently a ribose sugar (2′-OH). In certain embodiments, each A, C, G, U, and N is a ribose sugar (2′-OH). Thus, for example, mA represents 2′-O-methyl adenosine; xA represents a UNA nucleotide with an adenine nucleobase; eA represents an ENA nucleotide with an adenine nucleobase; and dA represents an adenosine deoxyribonucleotide. As used herein, (L1) refers to an internal linker having a bridging length of about 15-21 atoms.

[0955] sgRNA designations are sometimes provided with one or more leading zeroes immediately following the G. This does not affect the meaning of the designation. Thus, for example, G000282, G0282, G00282, and G282 refer to the same sgRNA. Similarly, crRNA and or trRNA designations are sometimes provided with one or more leading zeroes immediately following the CR or TR, respectively, which does not affect the meaning of the designation. Thus, for example, CR000100, CR00100, CR0100, and CR100 refer to the same crRNA, and TR000200, TR00200, TR0200, and TR200 refer to the same trRNA.

### EXAMPLES

[0956] The following examples are provided to illustrate certain disclosed embodiments and are not to be construed as limiting the scope of this disclosure in any way.

### Example 1. Materials and Methods

In Vitro Transcription (“IVT”) of Nuclease mRNA

[0957] Capped and polyadenylated mRNA containing N1-methyl pseudo-U was generated by in vitro transcription using routine methods. For example, a plasmid DNA containing a T7 promoter, a sequence for transcription, and a polyadenylation region was linearized with XbaI per manufacturer's protocol. The XbaI was inactivated by heating. The linearized plasmid was purified from enzyme and buffer salts. The IVT reaction to generate modified mRNA was performed by incubating at 37° C.: 50 ng/μL linearized plasmid; 2-5 mM each of GTP, ATP, CTP, and N1-methyl pseudo-UTP (Trilink); 10-25 mM ARCA (Trilink); 5 U/μL T7 RNA polymerase; 1 U/μL Murine RNase inhibitor (NEB); 0.004 U/μL Inorganic E. coli pyrophosphatase (NEB); and 1× reaction buffer. TURBO DNase (Thermo Fisher) was added to a final concentration of 0.01 U/μL, and the reaction was incubated at 37° C. to remove the DNA template.

[0958] The mRNA was purified using a MegaClear Transcription Clean-up kit (Thermo Fisher) or a RNeasy Maxi kit (Qiagen) per the manufacturers' protocols. Alternatively, the mRNA was purified through a precipitation protocol, which in some cases was followed by HPLC-based purification. Briefly, after the DNase digestion, mRNA was purified using LiCl precipitation, ammonium acetate precipitation, and sodium acetate precipitation. For HPLC purified mRNA, after the LiCl precipitation and reconstitution, the mRNA was purified by RP-IP HPLC (see, e.g., Kariko, et al. Nucleic Acids Research, 2011, Vol. 39, No. 21 e142). The fractions chosen for pooling were combined and desalted by sodium acetate/ethanol precipitation as described above. In a further alternative method, mRNA was purified with a LiCl precipitation method followed by further purification by tangential flow filtration. RNA concentrations were determined by measuring the light absorbance at 260 nm (Nanodrop), and transcripts were analyzed by capillary electrophoresis by Bioanalyzer (Agilent).

[0959] Streptococcus pyogenes (“Spy”) Cas9 mRNA was generated from plasmid DNA encoding an open reading frame according to SEQ ID Nos: 661-665 (see sequences in Table 4A). When the sequences cited in this paragraph are referred to below with respect to RNAs, it is understood that Ts should be replaced with Us (which can be modified nucleosides as described above). Messenger RNAs used in the Examples include a 5′ cap and a 3′ polyadenylation sequence e.g., up to 100 nts and are identified in Table 4A. Guide RNAs are chemically synthesized by methods known in the art.

[0960] Guide RNA was chemically synthesized by commercial vendors or using standard in vitro synthesis techniques with modified nucleotides.

### Hepatocyte Cell Preparation

[0961] Primary mouse hepatocytes (PMH), primary rat hepatocytes (PRH), primary human hepatocytes (PHH), and primary cynomolgus hepatocytes (PCH) were prepared as follows. PMH (Gibco, MCM837, unless otherwise specified), PRH (Gibco, Rs977, unless otherwise specified), PCH (In Vitro ADMET Laboratories, 10136011, unless otherwise specified), PHH (Gibco, Hu8284, unless otherwise specified) were thawed and resuspended in 50 mL Cryopreserved Hepatocyte Recovery Media (CHRM) (Invitrogen, CM7000) followed by centrifugation. Cells were resuspended in hepatocyte medium with plating supplements: Williams' E Medium Plating Supplements with FBS content (Gibco, Cat. A13450). Cells were pelleted by centrifugation, resuspended in media and plated at a density of 20,000 cells/well for PMH, and 30,000 for PHH on Bio-coat collagen I coated 96-well plates (Corning #354407). Plated cells were allowed to settle and adhere for 4-6 hours in a tissue culture incubator at 37° C. and 5% CO₂ atmosphere. After incubation cells were checked for monolayer formation and were washed once and plated with 100 μL hepatocyte maintenance medium: Williams' E Medium (Gibco, Cat. A12176-01) plus supplement pack (Gibco, Cat. CM3000).

### HEK Cell Preparation

[0962] HEK-293 cells (ATCC, CRL-1573, unless otherwise specified) were thawed and resuspended in serum-free Dulbecco's Modified Eagle Medium (Corning #10-013-CV) with 10% FBS content (Gibco #A31605-02) and 1% Penicillin-Streptomycin (Gibco #15070063). Cells were counted and plated in Dulbecco's Modified Eagle Medium (Corning #10-013-CV) with 10% FBS content (Gibco #A31605-02) on 96-well tissue culture plate (Falcon, #353072). Plated cells were allowed to settle and adhere for 18 hours in a tissue culture incubator at 37° C. and 5% CO₂ atmosphere.

Preparation of LNP Formulation Containing sgRNA and Cas9 mRNA

[0963] In general, the lipid nanoparticle components were dissolved in 100% ethanol at various molar ratios. The RNA cargos (e.g., Cas9 mRNA and sgRNA) were dissolved in 25 mM citrate, 100 mM NaCl, pH 5.0, resulting in a concentration of RNA cargo of approximately 0.45 mg/mL. The LNPs used contained ionizable lipid ((9Z,12Z)-3-((4,4-bis(octyloxy)butanoyl)oxy)-2-((((3-(diethylamino)propoxy)carbonyl)oxy)methyl)propyl octadeca-9,12-dienoate, also called 3-((4,4-bis(octyloxy)butanoyl)oxy)-2-((((3-(diethylamino)propoxy)carbonyl)oxy)methyl)propyl (9Z,12Z)-octadeca-9,12-dienoate), also called herein Lipid A, cholesterol, distearoylphosphatidylcholine (DSPC), and 1,2-dimyristoyl-rac-glycero-3-methylpolyoxyethylene glycol 2000 (PEG2k-DMG) in a molar ratio of 50% Lipid A, 38% cholesterol, 9% DSPC, and 3% PEG2k-DMG. The LNPs were formulated with a lipid amine to RNA phosphate (N:P) molar ratio of about 6. The LNPs used comprise a single RNA species such as Cas9 mRNA or a sgRNA. LNP are similarly prepared with a mixture of Cas9 mRNA and a guide RNA.

[0964] The LNPs were prepared using a cross-flow technique utilizing impinging jet mixing of the lipid in ethanol with two volumes of RNA solution and one volume of water. First, the lipid in ethanol was mixed through a mixing cross with the two volumes of RNA solution. Then, a fourth stream of water was mixed with the outlet stream of the cross through an inline tee (See WO2016010840 FIG. 2). The LNPs were held for 1 hour at room temperature, and further diluted with water (approximately 1:1 v/v). Diluted LNPs were buffer exchanged into 50 mM Tris, 45 mM NaCl, 5% (w/v) sucrose, pH 7.5 (TSS) and concentrated as needed by methods known in the art. The resulting mixture was then filtered using a 0.2 μm sterile filter. The final LNPs were characterized to determine the encapsulation efficiency, polydispersity index, and average particle size. The final LNP was stored at 4° C. or −80° C. until further use.

sgRNA and Cas9 mRNA Lipofection

[0965] Lipofection of Cas9 mRNA and gRNAs used pre-mixed lipid formulations. The lipofection reagent contained ionizable Lipid A, cholesterol, DSPC, and PEG2k-DMG in a molar ratio of 50% Lipid A, 38% cholesterol, 9% DSPC, and 3% PEG2k-DMG. This mixture was reconstituted in 100% ethanol then mixed with RNA (e.g., Cas9 mRNA and gRNA) at a lipid amine to RNA phosphate (N:P) molar ratio of about 6.0.

### Next-Generation Sequencing (“NGS”) and Analysis for Editing Efficiency

[0966] Genomic DNA was extracted using a commercial kit according to the manufacturer's protocol, for example QuickExtract™ DNA Extraction Solution (Lucigen, Cat. QE09050). To quantitatively determine the efficiency of editing at the target location in the genome, deep sequencing was utilized to identify the presence of insertions and deletions introduced by gene editing. PCR primers were designed around the target site within the gene of interest (e.g., TRAC) and the genomic area of interest was amplified. Primer sequence design was done as is standard in the field.

[0967] Additional PCR was performed according to the manufacturer's protocols (Illumina) to add chemistry for sequencing. The amplicons were sequenced on an Illumina MiSeq instrument. The reads were aligned to the human reference genome (e.g., hg38) after eliminating those having low quality scores. Reads that overlapped the target region of interest were re-aligned to the local genome sequence to improve the alignment. Then the number of wild type reads versus the number of reads which contain C-to-T mutations, C-to-A/G mutations, or indels was calculated. Insertions and deletions were scored in a 20 bp region centered on the predicted Cas9 cleavage site. Indel percentage is defined as the total number of sequencing reads with one or more base inserted or deleted within the 20 bp scoring region divided by the total number of sequencing reads, including wild type. C-to-T mutations or C-to-A/G mutations were scored in a 40 bp region including 10 bp upstream and 10 bp downstream of the 20 bp sgRNA target sequence. The C-to-T editing percentage is defined as the total number of sequencing reads with either one or more C-to-T mutations within the 40 bp region divided by the total number of sequencing reads, including wild type. The percentage of C-to-A/G mutations are calculated similarly.

### Example 2. In Vitro Editing with Truncated NmeCas9 Guides in Human Embryonic Kidney (HEK) Cells

[0968] Truncated Nme-Cas9 sgRNAs targeting the SEAP gene were designed and tested to evaluate the impact of each modification on guide functionality. Modifications in guides that retained their editing efficacy were considered well-tolerated and included in future studies.

### Example 2.1 Plasmid Evaluation of sgRNA Modification Patterns

### HEK Cell Preparation

[0969] HEK-Blue™ cells, a HEK reporter cell line with a SEAP reporter, from (Invivogen, Cat. hkb-il1b) were thawed and resuspended in 15 mL Growth Media (DMEM, 4.5 g/l glucose, 2 mM L-Glutamine, 10% (v/v) fetal bovine serum (FBS), 50 U/ml penicillin, 50 mg/ml streptomycin, 100 mg/ml Normocin™ followed by centrifugation. The supernatant was discarded and the pelleted cells resuspended in Growth Media. Cells were plated at a density of 10,000 cells/well on 96-well tissue culture plate (Falcon, #353072) with Test Medium: DMEM, 4.5 g/l glucose, 2 mM L-Glutamine, 10% (v/v), heat-inactivated FBS (30 min at 56° C.), 50 U/ml penicillin, 50 mg/ml, streptomycin, 100 mg/ml Normocin™). Plated cells were allowed to settle and adhere for 18 hours in a tissue culture incubator at 37° C. and 5% CO₂ atmosphere.

### Plasmid-Based Transfection

[0970] NmeCas9 sgRNA truncation variants, with identical 23-nt complementarity to the SEAP cassette of the HEK-Blue™ cells, but with different sgRNA scaffold truncations were designed and cloned using standard Gibson Assembly methods for plasmid generation. The final plasmid reaction was plated on Luria Broth (LB) plates (Teknova, L8000) supplemented with ampicillin (Teknova, L5104) and incubated in a tissue culture incubator at 37° C. Plasmid colonies were inoculated in 4 ml Luria Broth plates (Teknova, L8000) supplemented with 100 ug/mL ampicillin (Teknova, A2135) and incubated at 37° C. overnight. Plasmids were purified according to manufacturer's instructions using Zyppy plasmid purification kit (Zymo Research, D4036).

[0971] After incubation, plasmid concentrations were measured using Qubit HS assay (Invitrogen, Catalog #Q32851) and diluted to 50 ng/μL. The plasmid DNA for each sgRNA and a pcDNA3.1 transfection plasmid encoding Nme1Cas9 (SEQ ID NO: 645) were diluted in Opti-MEM (Thermo Fisher, L3000015) and lipoplexed using Lipofectamine 3000 (Thermo Fisher, Catalog #51985091) according to manufacturer's instructions. Briefly, the lipofectamine-DNA mixture was incubated for 15 minutes at room temperature. After incubation, 10 μl of the mixture was added to HEK-Blue™ cells and incubated in a tissue culture incubator at 37° C. and 5% CO₂ atmosphere for 72 hours. Post-transfection, cells were harvested. Genomic DNA isolation and NGS analysis was performed as described in Example 1.

[0972] Editing efficiency was determined for unmodified sgRNA designs with identical 23-nt complementarity to the SEAP loci but with different sgRNA scaffold truncations. The assays were performed in three iterative rounds of screening to identify truncations that altered editing efficiency, either alone or in combination. Cells were prepared and analyzed using the same protocols and control plasmid (RNAWT-145). Samples were included in triplicates in each assay. Mean editing results with standard deviation (SD) are shown in Table 5 and FIG. 1. The relatively low levels of editing efficiency observed may result from the SEAP sgRNAs editing both the endogenous human SEAP gene as well as the exogenous SEAP expression cassette engineered into the HEK-Blue™ cells. NGS primers were designed such that only the editing events at the exogenous SEAP locus were quantified. Nevertheless, editing at the endogenous loci is not expected to change the relative editing levels read at the exogenous SEAP locus using truncated SEAP sgRNAs.

TABLE 5
Mean percent editing in HEK-Blue ™ cells

| Experiment | Plasmid ID | Mean % Edit | SD |
|---|---|---|---|
| Round 1 | RNAWT-145 | 6.8 | 0.3 |
| | RNA9-102 | 0.3 | 0.0 |
| | RNA7-106 | 5.0 | 0.6 |
| | RNA8-106 | 0.6 | 0.2 |
| | RNA6-110 | 4.3 | 0.6 |
| | RNA6b-110 | 0.4 | 0.0 |
| | RNA5-112 | 0.4 | 0.1 |
| | RNA4-116 | 0.6 | 0.3 |
| | RNA3-122 | 1.9 | 0.1 |
| | RNA2-126 | 6.6 | 0.3 |
| | ES-100 | 4.6 | 1.7 |
| | ES-121 | 5.0 | 0.8 |
| Round 2 | RNAWT-145 | 7.5 | 0.8 |
| | RNA17-101 | 3.7 | 0.5 |
| | RNA18-103 | 4.4 | 0.4 |
| | RNA15-105 | 0.1 | 0.0 |
| | RNA16-105 | 4.2 | 0.2 |
| | RNA13-107 | 4.1 | 0.4 |
| | RNA14-109 | 6.4 | 0.5 |
| | RNA12-111 | 8.3 | 0.8 |
| | RNA11-113 | 6.9 | 1.0 |
| | RNA10-115 | 10.2 | 0.6 |
| Round 3 | RNAWT-145 | 10.5 | 1.0 |
| | R10B-111 | 7.6 | 1.2 |
| | R10E-109 | 8.7 | 1.2 |
| | R10F-113 | 5.7 | 0.5 |
| | R10G-113 | 4.6 | 0.6 |
| | R10H-113 | 5.4 | 0.8 |
| | R10I-113 | 4.4 | 1.1 |
| | R10J-113 | 3.2 | 0.9 |
| | R19-112 | 4.7 | 0.9 |

### Example 2.2. Evaluation of gRNA Chemical Modifications in HEK-293 Cells

[0973] Guide modification patterns of select truncated sgRNA tested in the study described above were further evaluated to assess the impact of the modifications on guide editing efficiency. A stable cell line expressing Nme2 Cas9 from a lentiviral expression construct, referred to herein as HEK-Nme2, was engineered for constitutive Nme2 Cas9 expression.

### HEK Cell Preparation

[0974] HEK-293 (ATCC, CRL-1573) cells were thawed in maintenance media (DMEM (Corning, #10-013-CV), 10% FBS (Gibco, #A31605-02)). Cells were then plated at a cell density of 200,000 cells per well in 6-well plates (Corning, #353046) in Dulbecco's Modified Eagle Medium (Corning #10-013-CV) with 10% FBS content (Gibco, #A31605-02). Cells were transduced in the presence of polybrene (Millipore Sigma, TR-1003) following the manufacturer's protocol with Cellecta #SVCRU617-L lentiviral vector encoding Nme2 Cas9 (SEQ ID NO: 640).

[0975] Cells were incubated for 10 days in a tissue culture incubator at 37° C. and 5% CO₂ atmosphere. Cells were subsequently washed, processed on a cell sorter (Sony Biotechnologies, SH800Z) and analyzed using the FlowJo software package for GFP luminescence. Polyclonal mixtures of the selected HEK-Nme2 cells prepared with a MOI of 2 were used for subsequent studies.

[0976] Transduced HEK-Nme2 cells described above were thawed and resuspended in serum-free Dulbecco's Modified Eagle Medium (Corning #10-013-CV) with 10% FBS content (Gibco #A31605-02) and 1% Penicillin-Streptomycin (Gibco #15070063). Cells were counted and plated at a density of 20,000 cells/well in Dulbecco's Modified Eagle Medium (Corning #10-013-CV) with 10% FBS content (Gibco #A31605-02) on 96-well tissue culture plate (Falcon, #353072). Plated cells were allowed to settle and adhere for 18 hours in a tissue culture incubator at 37° C. and 5% CO₂ atmosphere.

### Cell Transfection Using MessengerMAX

[0977] Guide modification patterns consisting of 2′-O methyl (2′-OMe) and phosphorothioate (PS) modifications were tested in the context of sgRNA to evaluate the impact of the modifications on guide editing efficiency.

[0978] Truncated dual guide RNAs (dgRNA) were created by annealing modified, truncated tracrRNAs to modified crRNA targeting one of two sites on VEGFA (T25 or T47, target sites previously published in WO2019094791) in a mixture of 1 μl 100 μM crRNA, 1 μL 100 μM tracrRNA and 8 uL Duplex Buffer (Integrated DNA Technologies, #11-05-01-12). The Nme2-Cas9 tracrRNA and crRNA solution was annealed at 95° C. for 3 minutes followed by an incremental temperature decrease of 0.1 C/s to 20° C. Samples were kept on ice until used. Dual guide RNA with an initial concentration of 10 uM was diluted in Opti-MEM (Thermo Fisher, #51985091) for a concentration of 250 nM in 10 uL and mixed with Lipofectamine MessengerMAX (Invitrogen, catalog #LMRNA001) according to manufacturer instructions. A 20 uL aliquot of the solution was added to each tissue culture well for each concentration and incubated in a tissue culture incubator at 37° C. and 5% CO₂ atmosphere for 72 hours.

[0979] Post incubation, genomic DNA was isolated and NGS analysis was performed as described above.

[0980] Editing efficiency was evaluated as described in Example 1 for the dgRNA containing the 16 truncated tracrRNAs (TR0 #####) annealed to the crRNAs (CR0 #####), indicated in Table 6, targeting the two genomic sites (T25, T47) in the VEGFA gene at dgRNA concentrations of 50 nM. Duplicate samples were included in the assay. Mean editing results with standard deviation (SD) are shown in Table 6 and FIG. 2.

TABLE 6
In vitro editing in HEK-Nme2 cells

| | |
|---|---|
| VEGFA Site 1 | VEGFA Site 2 |
| (T25-CR018648) | (T47-CR018656) |

| | Mean % | | Mean % | |
|---|---|---|---|---|
| Tracr ID | Edit | SD | Edit | SD |
| TR018227 | 7.1 | 0.1 | 26.0 | 2.1 |
| TR018228 | 8.6 | 0.2 | 28.4 | 8.7 |
| TR018229 | 4.9 | 1.1 | 25.7 | 6.3 |
| TR018230 | 2.1 | 0.1 | 23.7 | 1.5 |
| TR018231 | 1.1 | 0.2 | 23.6 | 5.2 |
| TR018232 | 2.4 | 0.8 | 30.3 | 4.3 |
| TR018233 | 2.2 | 0.6 | 26.8 | 1.6 |
| TR018234 | 0.0 | 0.0 | 32.6 | 2.4 |
| TR018235 | 6.1 | 0.2 | 20.3 | 3.4 |
| TR018236 | 8.0 | 0.6 | 30.8 | 3.3 |
| TR018237 | 0.1 | 0.1 | 0.3 | 0.1 |
| TR018238 | 5.5 | 0.0 | 32.6 | 2.3 |
| TR018239 | 1.6 | 0.1 | 26.8 | 5.5 |
| TR018240 | 1.0 | 0.2 | 9.4 | 2.5 |
| TR018241 | 2.4 | 0.4 | 11.3 | 0.5 |
| TR018242 | 2.4 | 0.4 | 34.3 | 2.2 |

### Example 3. In Vitro Editing with Chemically Modified Nme2Cas9 sgRNAs

### Example 3.1 Evaluation of Modified sgRNA in HEK-Nme2 Cells

[0981] Guide modification patterns consisting of 2′-O methyl (2′-OMe) and phosphorothioate (PS) modifications were tested in the context of sgRNA to evaluate the impact of the modifications on guide editing efficiency.

### HEK Cell Preparation

[0982] HEK-Nme2 cells were prepared as described in Example 2. Cells were counted and plated at a density of 30,000 cells/well (Falcon, #353072). Cells were transfected as described in Examples 2.2. Seventy-two hours post transfection, the cells were prepared for NGS analysis as described in Example 1.

[0983] Editing efficiency was evaluated for 43 chemically modified sgRNA targeting the VEGFA gene at site T47 as described in Example 2.2. Two separate experiments were conducted with samples tested in triplicates in each assay. The results obtained in both experiments were comparable so the mean editing results with standard deviation (SD) from a single experiment are shown in Table 7 and FIG. 3. “ND” in the table represents values that could not be determined due to experimental failure.

TABLE 7
Mean percent editing in HEK-Nme2 cells

| Guide ID | Mean % Edit | SD |
|---|---|---|
| G020031 | 3.9 | 1.0 |
| G020032 | 20.4 | 1.3 |
| G020033 | 1.1 | 0.0 |
| G020034 | 15.5 | 1.4 |
| G020035 | 1.4 | 0.2 |
| G020036 | 14.4 | 2.3 |
| G020037 | 13.8 | 0.9 |
| G020038 | 5.9 | 1.8 |
| G020039 | 20.0 | 5.0 |
| G020040 | 47.2 | 5.0 |
| G020041 | 45.3 | 5.5 |
| G020042 | 54.3 | 5.1 |
| G020043 | 42.7 | 11.3 |
| G020044 | 54.5 | 0.5 |
| G020045 | 5.7 | 3.9 |
| G020046 | 28.1 | 5.1 |
| G020047 | 12.6 | 3.0 |
| G020048 | 13.5 | 4.2 |
| G020049 | 1.1 | 0.1 |
| G020050 | 11.1 | 1.7 |
| G020051 | 12.9 | 3.3 |
| G020052 | 5.8 | 1.3 |
| G020053 | 20.0 | 4.2 |
| G020054 | 46.6 | 8.2 |
| G020055 | 34.7 | 2.2 |
| G020056 | 17.6 | 2.9 |
| G020057 | 9.5 | 3.3 |
| G020058 | 14.3 | 2.0 |
| G020059 | 6.6 | 3.7 |
| G020060 | 6.3 | 0.5 |
| G020061 | 11.1 | 5.8 |
| G020062 | 4.2 | 2.0 |
| G020063 | ND | ND |
| G020064 | 25.7 | 2.9 |
| G020065 | ND | ND |
| G020066 | 37.5 | 4.4 |
| G020067 | 39.0 | 5.5 |
| G020068 | 54.3 | 2.5 |
| G020069 | 28.2 | 3.8 |
| G020070 | 1.5 | 0.4 |
| G020071 | 43.3 | 5.5 |
| G020072 | 48.3 | 2.6 |
| G020073 | 61.5 | 1.2 |

### Example 3.2 Evaluation of Alternative sgRNA Modification Patterns in HEK-293 Cells

[0984] Additional Nme2 sgRNAs with alternative modification patterns were tested in HEK-293 cells (ATCC, CRL-1573) to evaluate the impact of additional chemical modifications on guide editing efficiency. Cells were prepared and transfected as described in Example 1, delivering 100 ng Nme2 mRNA and sgRNA at a final concentration of 50 nM. Cells were plated at a density of 15,000 cells/well. Seventy-two hours post transfection, genomic DNA was isolated and analyzed via NGS as described in Example 1.

[0985] Editing efficiency was evaluated for 54 chemically modified sgRNAs targeting the VEGFA gene at site T47 as provided above. Triplicate samples were tested in each assay. Mean editing results with standard deviation (SD) are shown in Table 8 and FIG. 4.

TABLE 8
Mean percent editing in HEK-293 cells

| Guide ID | Mean % Edit | SD |
|---|---|---|
| G020044 | 76.2 | 3.9 |
| G020054 | 78.1 | 9.4 |
| G020057 | 47.3 | 5.8 |
| G020058 | 32.8 | 7.1 |
| G020063 | 54.1 | 2.7 |
| G020065 | 72.2 | 0.2 |
| G020070 | 9.3 | 0.3 |
| G020073 | 75.5 | 0.6 |
| G020711 | 34.7 | 8.6 |
| G020712 | 39.9 | 3.3 |
| G020713 | 47.2 | 3.6 |
| G020714 | 60.7 | 7.7 |
| G020715 | 69.0 | 1.9 |
| G020716 | 62.2 | 9.5 |
| G020717 | 75.9 | 2.2 |
| G020718 | 81.3 | 1.4 |
| G020719 | 74.3 | 6.4 |
| G020720 | 73.0 | 3.4 |
| G020721 | 76.1 | 5.9 |
| G020722 | 76.2 | 5.7 |
| G020723 | 73.3 | 5.1 |
| G020724 | 73.7 | 2.5 |
| G020725 | 82.4 | 2.9 |
| G020726 | 72.2 | 1.2 |
| G020727 | 79.3 | 0.8 |
| G020728 | 85.3 | 5.3 |
| G020729 | 76.9 | 0.5 |
| G020730 | 80.6 | 2.4 |
| G020731 | 81.4 | 1.8 |
| G020732 | 80.7 | 1.0 |
| G020733 | 78.7 | 4.6 |
| G020734 | 77.3 | 6.3 |
| G020735 | 80.6 | 2.8 |
| G020736 | 78.5 | 2.7 |
| G020737 | 70.4 | 4.6 |
| G020738 | 73.7 | 5.6 |
| G020739 | 84.8 | 0.4 |
| G020740 | 78.9 | 3.7 |
| G020741 | 66.6 | 2.5 |
| G020742 | 82.4 | 2.4 |
| G020743 | 80.9 | 3.1 |
| G020744 | 79.0 | 5.0 |
| G020745 | 79.7 | 1.9 |
| G020746 | 85.5 | 4.3 |
| G020747 | 21.9 | 3.4 |
| G020748 | 84.2 | 2.0 |
| G020749 | 75.7 | 1.2 |
| G020750 | 75.2 | 2.5 |
| G020751 | 72.0 | 5.4 |
| G020752 | 78.4 | 2.7 |
| G020753 | 77.3 | 10.2 |
| G020754 | 80.7 | 1.1 |
| G020755 | 73.6 | 2.0 |
| G020756 | 76.5 | 4.0 |

### Example 4. In Vitro Editing with Selected Guides in Primary Mouse Hepatocytes (PMH)

[0986] A modified sgRNA screen was conducted to evaluate the editing efficiency of 95 different sgRNAs targeting various sites within the mouse TTR gene. Based on that study, two sgRNAs (G021320 and G021256) were selected for evaluation in a dose response assay. These two test guides were compared to a mouse TTR SpyCas9 guide (G000502) with a 20 nucleotide guide sequence. The tested NmeCas9 sgRNAs targeting the mouse TTR gene include a 24 nucleotide guide sequence (as represented by N) and a guide scaffold as follows: mN*mNNNNNNNNmNNNmNNNNNNNNNNmGUUGmUmAmGmCUCCCmUmGm AmAmAmCmCGUUmGmCUAmCAAU*AAGmGmCCmGmUmCmGmAmAmAmGmAm UGUGCmCGCmAmAmCmGCUCUmGmCCmUmUmCmUGmGCmAmUC*mG*mU*mU (SEQ ID NO: 4), where A, C, G, U, and N are adenine, cytosine, guanine, uracil, and any ribonucleotide, respectively, unless otherwise indicated. An m is indicative of a 2′O-methyl modification, and an * is indicative of a phosphorothioate linkage between the nucleotides. Unmodified and modified versions of the guides are provided in Table 1-2.

[0987] Guides and Cas9 mRNA were lipofected, as described below, into primary mouse hepatocytes (PMH). PMH (In Vitro ADMET Laboratories MCM114) were prepared as described in Example 1. Lipofections were performed as described in Example 1 with a dose response of sgRNA and mRNA. Briefly, cells were incubated at 37° C., 5% CO₂ for 24 hours prior to treatment with lipoplexes. Lipoplexes were incubated in maintenance media containing 10% fetal bovine serum (FBS) at 37° C. for 10 minutes. Post-incubation the lipoplexes were added to the mouse hepatocytes in an 8 point, 3-fold dose response assay starting at maximum dose of 300 ng Cas9 mRNA and 50 nM sgRNA. Messenger RNA doses scale along with gRNA dose in each condition, although only gRNA dose is listed in Table 9. The cells were lysed 72 hours post-treatment and NGS analysis was performed as described in Example 1.

[0988] Dose response of editing efficiency to guide concentration was performed in triplicate samples. Table 9 shows mean percent editing and standard deviation (SD) at each guide concentration and a calculated EC₅₀ value. Mean and standard deviation (SD) is illustrated in FIG. 5.

TABLE 9
Mean percent editing in primary mouse hepatocytes

| | EC₅₀ | SgRNA | Mean % | |
|---|---|---|---|---|
| Sample | (nM) | (nM) | Edit | SD |
| SpyCas9 mRNA + | 22.0 | 50 | 95.7 | 0.3 |
| G000502 | | 16.7 | 40.9 | 14.8 |
| | | 5.6 | 6.4 | 3.3 |
| | | 1.9 | 0.8 | 0.3 |
| | | 0.6 | 0.2 | 0.08 |
| | | 0.2 | 0.1 | 0 |
| | | 0.1 | 0.1 | 0 |
| | | 0 | 0.1 | 0 |
| Nme2 Cas9 | 18.7 | 50 | 86.5 | 0.9 |
| mRNA Q (SEQ | | 16.7 | 41.8 | 2.1 |
| ID NO: 635) + | | 5.6 | 5.8 | 1.4 |
| G021320 | | 1.9 | 1.2 | 0.3 |
| | | 0.6 | 0.4 | 0.2 |
| | | 0.2 | 0.1 | 0.1 |
| | | 0.1 | 0.1 | 0 |
| | | 0 | 0.1 | 0 |
| Nme2 Cas9 | 20.9 | 50 | 92.3 | 0.5 |
| mRNA Q (SEQ | | 16.7 | 35.1 | 2 |
| ID NO: 635) + | | 5.6 | 2.6 | 0.5 |
| G021256 | | 1.9 | 0.6 | 0.4 |
| | | 0.6 | 0.1 | 0 |
| | | 0.2 | 0.1 | 0 |
| | | 0.1 | 0.1 | 0 |
| | | 0 | 0.1 | 0 |

### Example 5. In Vitro Editing in Primary Mouse Hepatocytes (PMH) with Dilution Curve

### Example 5.1. Modified sgRNA Evaluation Using Dilution Series

[0989] Modified sgRNAs with various scaffold structures, all targeting a previously published site in the mouse pcsk9 gene (see WO2019094791) were designed as shown in Tables 1-2 and tested for editing efficiency using in primary mouse hepatocytes (PMH). Cells were prepared as described in Example 1 using PMH cells (In Vitro ADMET Laboratories) and plated at a density of 20,000 cells/well. Cells were transfected using MessengerMax (Invitrogen) according to the manufacturer's protocols with 1 ng/μl Nme2 Cas9 mRNA (mRNA U) and sgRNA at concentrations as indicated in Table 10. Duplicate samples were included in the assay. Cells were harvested 72 hours following transfection and analyzed by NGS as described in Example 1. Mean percent editing with standard deviation are shown in Table 10 and FIG. 6.

TABLE 10
Mean percent editing in PMH

| Guide | G017564 | | G017565 | | G017566 | |
|---|---|---|---|---|---|---|
| concentration | Mean % | | Mean % | | Mean % | |
| (nM) | editing | SD | editing | SD | editing | SD |
| 50.0 | 25.7 | 3.2 | 25.6 | 4.9 | 27.7 | 0.4 |
| 25.0 | 27.8 | 1.4 | 20.0 | 1.7 | 26.4 | 4.7 |
| 12.5 | 15.3 | 1.7 | 12.9 | 0.8 | 18.2 | 1.7 |
| 6.3 | 10.6 | 0.6 | 8.7 | 0.9 | 12.6 | 0.9 |
| 3.1 | 5.3 | 0.2 | 3.6 | 0.3 | 6.7 | 0.7 |
| 1.6 | 5.0 | 1.1 | 3.6 | 0.6 | 4.8 | 0.2 |
| 0.8 | 1.3 | 0.5 | 0.2 | 0.1 | 2.8 | 0.3 |
| 0.4 | 0.8 | 0.3 | 0.5 | 0.1 | 1.8 | 0.1 |
| 0.2 | 0.3 | 0.1 | 0.2 | 0.1 | 0.7 | 0.1 |
| 0.1 | 0.1 | 0.0 | 0.1 | 0.1 | 0.2 | 0.1 |
| 0.0 | 0.1 | 0.0 | 0.0 | 0.0 | 0.3 | 0.1 |

### Example 5.2. Evaluation of mRNA Poly-A Tail Modifications and Cargo Ratios

[0990] An sgRNA targeting the mouse pcsk9 gene was selected from Table 10 to evaluate guide editing efficiency resulting from particular combinations of poly-A tail modifications and sgRNA:mRNA ratios. PMH cells used were prepared, treated, and analyzed as described in Example 1 unless otherwise noted. PMH (Gibco) were plated at a density of 15,000 cells/well.

[0991] LNPs were generally prepared as described in Example 1. LNPs were prepared with the lipid composition of 50/9/38/3, expressed as the molar ratio of ionizable lipid A/cholesterol/DSPC/PEG, respectively. The LNPs were formulated with a lipid amine to RNA phosphate (N:P) molar ratio of about 6. LNPs encapsulated gRNA G017566 or one of three mRNAs encoding the same Nme2Cas9 open reading frame (ORF) but with different encoded poly-A tails, as indicated in Table 11. A preliminary experiment holding the sgRNA application constant and varying the amount of mRNA applied showed that 1:1 sgRNA:mRNA ratio by weight resulted in the highest percent editing. In the current Example, increasing doses mRNA LNP and gRNA LNP were applied to cells in 100 μl media as described in Table 11, maintaining a 1:1 sgRNA:mRNA ratio by weight. Table 11 and FIG. 7 show mean percent editing and standard deviation (SD).

TABLE 11
Mean percent editing in PMH

| | | | |
|---|---|---|---|
| | mRNA C | mRNA B | mRNA D |
| | SEQ ID | SEQ ID | SEQ ID |
| Total | NO: 622 | NO: 621 | NO: 623 |

| RNA | Mean % | | Mean % | | Mean % | |
|---|---|---|---|---|---|---|
| (ng) | editing | SD | editing | SD | editing | N |
| 333. | 49.1 | 0.9 | 44.3 | 0.0 | 39.6 | 1 |
| 111. | 37.5 | 3.2 | 43.4 | 0.2 | 30.3 | 1 |
| 37. | 12.8 | 0.2 | 15.6 | 1.0 | 9.3 | 1 |
| 12.3 | 1.3 | 0.2 | 2.2 | 0.0 | 1.1 | 1 |
| 4.1 | 0.1 | 0.0 | 0.2 | 0.0 | 0.0 | 1 |
| 1.4 | 0.1 | 0.0 | 0.0 | 0.0 | 0.1 | 1 |
| 0.5 | 0.1 | 0.0 | 0.1 | 0.1 | 0.0 | 1 |

### Example 5.3. sgRNA:mRNA Ratio Relative to sgRNA or pgRNA Using LNPs

[0992] Studies were conducted to evaluate the editing efficiency of sgRNA designs that contain PEG linkers (pgRNA). The study compared two gRNAs targeting TTR with the same guide sequence, one of which included three PEG linkers in the constant region of the guide (pgRNA, G021846) and one of which did not (G021845) as shown in Table 12. The guides and mRNA were formulated in separate LNPs and mixed to the desired ratios for delivery to primary mouse hepatocytes (PMH) via lipid nanoparticles (LNPs).

[0993] PMH cells were prepared, treated, and analyzed as described in Example 1 unless otherwise noted. PMH cells from In Vitro ADMET Laboratories (Lot #MCM114) were plated at a density of 15,000 cells/well. Cells were treated with LNPs as described below. LNPs were generally prepared as described in Example 1. LNPs were prepared with the lipid composition of 50/9/38/3, expressed as the molar ratio of ionizable lipid A/cholesterol/DSPC/PEG, respectively. The LNPs were formulated with a lipid amine to RNA phosphate (N:P) molar ratio of about 6. LNPs encapsulated a single RNA species, either gRNA G021845, gRNA G021846 or mRNA (mRNA M; SEQ ID NO: 631) as described in Example 1.

[0994] PMH cells were treated with varying amounts of LNPs at ratios of gRNA to mRNA of 1:4, 1:2, 1:1, 2:1, 4:1, or 8:1 by weight of RNA cargo. Duplicate samples were included in each assay. Guides were assayed in an 8 point 3-fold dose response curve starting at 1 ng/uL total RNA concentration as shown in Table 12. Mean percent editing results are shown in Table 12. FIG. 8A shows mean percent editing for sgRNA G021845 and FIG. 8B shows mean percent editing for sgRNA G021846. “ND” in the table represents values that could not be detected due to experimental failure.

TABLE 12
Mean percent editing in PMH

| | | sgRNA | | pgRNA | |
|---|---|---|---|---|---|
| | | (G021845) | | (G021846) | |
| Cargo ratio | LNP dose | Mean % | | Mean % | |
| (gRNA:mRNA) | (ng/uL) | editing | SD | editing | SD |
| 1:4 | 1 | 88.1 | 1.7 | ND | ND |
| | 0.3 | 68.7 | 5.7 | 78 | 0.3 |
| | 0.1 | 28.1 | 4.1 | 39.8 | 8.2 |
| | 0.03 | 8.7 | 2 | 5.1 | 0 |
| | 0.01 | 1.5 | 0.4 | 4 | 1.2 |
| | 0.004 | 0.6 | 0.5 | 0.2 | 0 |
| | 0.001 | 0.3 | 0.2 | 0.6 | 0.3 |
| 1:2 | 1 | 90.6 | 0 | 91.2 | 2.9 |
| | 0.3 | 78 | 2.4 | 85.6 | 1.4 |
| | 0.1 | 41.5 | 5.8 | 56.6 | 4.4 |
| | 0.03 | 23 | 5.4 | 17.5 | 0 |
| | 0.01 | 6.1 | 4.3 | 18.6 | 0.5 |
| | 0.004 | 0.1 | 0.1 | 3.4 | 1.7 |
| | 0.001 | 0.1 | 0 | 2.4 | 0.7 |
| 1:1 | 1 | 90.9 | 1.4 | 94.7 | 0.6 |
| | 0.3 | 71.8 | 4.2 | 84.7 | 0.9 |
| | 0.1 | 45.7 | 3.2 | 64.3 | 5.3 |
| | 0.03 | 27.4 | 1 | 44.8 | 11.5 |
| | 0.01 | 4.7 | 2.5 | 10.2 | 4.3 |
| | 0.004 | 0.2 | 0 | 1.7 | 0.7 |
| | 0.001 | 0.1 | 0 | 0.7 | 0.5 |
| 2:1 | 1 | 92.4 | 1.6 | 94.5 | 0.8 |
| | 0.3 | 80 | 1.3 | 85.7 | 0.2 |
| | 0.1 | 45.4 | 0 | 68 | 7.9 |
| | 0.03 | 47.2 | 3 | 49.3 | 0 |
| | 0.01 | 18.1 | 1.8 | 28.8 | 4.1 |
| | 0.004 | 0.8 | 0.7 | 3.8 | 2.4 |
| | 0.001 | 0.2 | 0.1 | 0.8 | 0.3 |
| 4:1 | 1 | 87.9 | 1.9 | 90.1 | 0 |
| | 0.3 | 80.2 | 2.2 | 84 | 0.1 |
| | 0.1 | 43.4 | 0 | 60.4 | 0.1 |
| | 0.03 | 46.2 | 0.5 | 46.1 | 0 |
| | 0.01 | 11.3 | 2.3 | 26.7 | 4.9 |
| | 0.004 | 0.4 | 0.2 | 1.5 | 0.4 |
| | 0.001 | 0.4 | 0.1 | 0.5 | 0.3 |
| 8:1 | 1 | 89.2 | 0 | 87.5 | 0 |
| | 0.3 | 76.7 | 3.9 | 78.6 | 3.1 |
| | 0.1 | 59.5 | 9.4 | 59.4 | 1.1 |
| | 0.03 | 36.4 | 7 | 45.3 | 0.5 |
| | 0.01 | 8.2 | 1.2 | 18.7 | 2.9 |
| | 0.004 | 0.6 | 0.6 | 2.6 | 0.3 |
| | 0.001 | 0.1 | 0 | 0.6 | 0.2 |

### Example 5.4 In Vitro Editing of Modified Pegylated Guides (pgRNAs) in PMH Using LNPs

Modified pgRNA Having the Same Targeting Site in the Mouse TTR Gene were Assayed to Evaluate the Editing Efficiency in PMH Cells.

[0995] PMH cells were prepared, treated, and analyzed as described in Example 1 unless otherwise noted. PMH cells from In Vitro ADMET Laboratories (Lot #MC148) were used and plated at a density of 15,000 cells/well. LNP formulations were prepared as described in Example 1. LNPs were prepared with the lipid composition of 50/9/38/3, expressed as the molar ratio of ionizable lipid A/cholesterol/DSPC/PEG, respectively. The LNPs were formulated with a lipid amine to RNA phosphate (N:P) molar ratio of about 6 and a gRNA indicated in Table I or mRNA

[0996] PMH in 100 μl media were treated with LNP for 30 ng total mRNA (mRNA P). by weight and LNP for gRNA in the amounts indicated in Table 13. Samples were run in duplicate. Mean editing results for PMH are shown in Table 13. and in FIG. 9.

TABLE 13
Mean percent editing in PMH

| | LNP | Mean | |
|---|---|---|---|
| | sgRNA | % | |
| Guide ID | (ng/uL) | editing | SD |
| G021844 | 0.7 | 96.6 | 0.5 |
| | 0.23 | 95.0 | 0.5 |
| | 0.08 | 80.0 | 5.9 |
| | 0.03 | 51.9 | 1.9 |
| | 0.009 | 13.9 | 0.4 |
| | 0.003 | 4.6 | 0.9 |
| | 0.001 | 0.8 | 0.1 |
| | 0.0003 | 0.2 | 0.1 |
| | 0.0001 | 0.1 | 0.0 |
| | 0.00004 | 0.2 | 0.1 |
| | 0.00001 | 0.1 | 0.0 |
| | 0 | 0.1 | 0.0 |
| G023413 | 0.7 | 96.4 | 0.4 |
| | 0.23 | 92.5 | 0.7 |
| | 0.08 | 73.9 | 0.9 |
| | 0.03 | 36.4 | 2.6 |
| | 0.009 | 10.3 | 1.5 |
| | 0.003 | 2.4 | 0.7 |
| | 0.001 | 0.6 | 0.1 |
| | 0.0003 | 0.3 | 0.0 |
| | 0.0001 | 0.1 | 0.0 |
| | 0.00004 | 0.1 | 0.0 |
| | 0.00001 | 0.1 | 0.0 |
| | 0 | 0.1 | 0.0 |
| G023414 | 0.7 | 96.5 | 0.2 |
| | 0.23 | 92.7 | 0.4 |
| | 0.08 | 74.1 | 2.7 |
| | 0.03 | 45.7 | 1.5 |
| | 0.009 | 13.7 | 0.7 |
| | 0.003 | 4.3 | 1.3 |
| | 0.001 | 0.7 | 0.1 |
| | 0.0003 | 0.2 | 0.0 |
| | 0.0001 | 0.2 | 0.1 |
| | 0.00004 | 0.2 | 0.1 |
| | 0.00001 | 0.1 | 0.0 |
| | 0 | 0.1 | 0.0 |
| G023415 | 0.7 | 96.5 | 0.5 |
| | 0.23 | 92.6 | 0.7 |
| | 0.08 | 73.1 | 0.2 |
| | 0.03 | 34.4 | 0.8 |
| | 0.009 | 14.2 | 0.2 |
| | 0.003 | 3.9 | 0.4 |
| | 0.001 | 0.5 | 0.2 |
| | 0.0003 | 0.2 | 0.0 |
| | 0.0001 | 0.2 | 0.0 |
| | 0.00004 | 0.1 | 0.0 |
| | 0.00001 | 0.1 | 0.0 |
| | 0 | 0.1 | 0.0 |
| G023416 | 0.7 | 91.5 | 1.8 |
| | 0.23 | 84.8 | 0.1 |
| | 0.08 | 56.4 | 2.7 |
| | 0.03 | 28.2 | 3.6 |
| | 0.009 | 10.0 | 1.7 |
| | 0.003 | 3.2 | 0.0 |
| | 0.001 | 0.8 | 0.3 |
| | 0.0003 | 0.2 | 0.0 |
| | 0.0001 | 0.1 | 0.0 |
| | 0.00004 | 0.1 | 0.0 |
| | 0.00001 | 0.1 | 0.0 |
| | 0 | 0.1 | 0.0 |
| G023417 | 0.7 | 90.5 | 1.8 |
| | 0.23 | 71.6 | 0.2 |
| | 0.08 | 30.9 | 6.7 |
| | 0.03 | 12.8 | 1.3 |
| | 0.009 | 4.8 | 1.5 |
| | 0.003 | 0.4 | 0.4 |
| | 0.001 | 0.2 | 0.1 |
| | 0.0003 | 0.1 | 0.0 |
| | 0.0001 | 0.1 | 0.1 |
| | 0.00004 | 0.1 | 0.0 |
| | 0.00001 | 0.1 | 0.0 |
| | 0 | 0.1 | 0.0 |
| G023418 | 0.7 | 96.8 | 0.3 |
| | 0.23 | 90.8 | 1.7 |
| | 0.08 | 63.3 | 1.8 |
| | 0.03 | 27.7 | 2.4 |
| | 0.009 | 8.8 | 0.5 |
| | 0.003 | 1.9 | 0.6 |
| | 0.001 | 0.7 | 0.2 |
| | 0.0003 | 0.2 | 0.1 |
| | 0.0001 | 0.1 | 0.0 |
| | 0.00004 | 0.1 | 0.0 |
| | 0.00001 | 0.1 | 0.0 |
| | 0 | 0.2 | 0.1 |
| G023419 | 0.7 | 96.6 | 0.6 |
| | 0.23 | 93.4 | 1.3 |
| | 0.08 | 71.1 | 3.3 |
| | 0.03 | 29.0 | 4.6 |
| | 0.009 | 9.7 | 4.1 |
| | 0.003 | 2.3 | 0.5 |
| | 0.001 | 0.4 | 0.0 |
| | 0.0003 | 0.1 | 0.0 |
| | 0.0001 | 0.2 | 0.0 |
| | 0.00004 | 0.2 | 0.0 |
| | 0.00001 | 0.1 | 0.0 |
| | 0 | 0.1 | 0.0 |

### Example 6. Chemical Modification Screens

### Example 6.1. Chemical Modification Screens in HEK-293 Cells

[0997] Editing efficiency was determined for chemically modified crRNA targeting two different VEGFA target sites (TS-25, TS-47). Each dgRNA contained a combination of a crRNA and a tracRNA with chemical modifications. Chemical modifications included phosphorothioate (PS) or 2′-O′ methyl (2′-OMe) modifications to bases at the 5′ and 3′ ends of both the crRNA and the tracrRNA (EndMod).

[0998] HEK-Nme2 cells were prepared as described in Example 2 except cells with MOI at 0.8 were used in this study. Cells were plated at a cell density of 10,000 cells per well. Cells were then transfected with dual guide RNA via the MessengerMax protocol described in Example 2.2 at a final concentration of 25 nM dgRNA. Duplicate samples were included in the assay. After 72 hours, genomic DNA (gDNA) was extracted from the cells and prepared for NGS analysis as described in Example 1. NGS analysis results were evaluated using the Graphpad Prism software (version 9). Mean percent editing is shown in Table 14 and FIGS. 10A-10B.

TABLE 14
Mean percent editing with different
combinations of crRNA and tracrRNA

| | Site TS-25 | | | Site TS-47 | | |
|---|---|---|---|---|---|---|
| | | Mean | | | Mean | |
| TracrRNA | crRNA | % | | crRNA | % | |
| ID | ID | Edit | SD | ID | Edit | SD |
| TR018617 | CR017872 | 4.20 | 2.20 | CR018650 | 3.25 | 0.25 |
| TR018618 | UnMod | 3.05 | 1.05 | UnMod | 6.90 | 1.50 |
| TR018619 | | 0.75 | 0.25 | | 8.55 | 2.15 |
| TR018620 | | 0.10 | 0.00 | | 1.95 | 0.05 |
| TR018621 | | 0.25 | 0.05 | | 3.80 | 1.50 |
| TR018622 | | 0.10 | 0.00 | | 1.15 | 0.75 |
| TR018617 | CR017873 | 3.80 | 2.30 | CR018651 | 7.70 | 0.10 |
| TR018618 | EndMod | 17.30 | 5.00 | EndMod | 26.70 | 3.60 |
| TR018619 | | 9.00 | 2.90 | | 20.85 | 4.25 |
| TR018620 | | 3.05 | 0.45 | | 13.15 | 3.85 |
| TR018621 | | 9.40 | 2.30 | | 18.35 | 3.55 |
| TR018622 | | 0.50 | 0.20 | | 1.20 | 0.40 |
| TR018617 | CR018473 | 4.95 | 1.75 | CR018652 | 9.10 | 2.90 |
| TR018618 | RaMod | 18.85 | 4.15 | RaMod | 27.50 | 5.40 |
| TR018619 | | 18.00 | 2.50 | | 28.45 | 3.05 |
| TR018620 | | 3.15 | 0.25 | | 8.60 | 3.60 |
| TR018621 | | 15.15 | 1.25 | | 19.60 | 3.00 |
| TR018622 | | 0.30 | 0.10 | | 1.40 | 0.10 |
| TR018617 | CR018645 | 3.35 | 1.55 | CR018653 | 2.80 | 0.40 |
| TR018618 | RA-maxPS | 15.60 | 4.80 | RA-maxPS | 12.35 | 0.85 |
| TR018619 | | 12.75 | 1.95 | | 25.95 | 1.35 |
| TR018620 | | 2.30 | 0.50 | | 5.75 | 1.45 |
| TR018621 | | 9.40 | 0.00 | | 10.95 | 2.55 |
| TR018622 | | 0.15 | 0.05 | | 0.70 | 0.70 |
| TR018617 | CR018646 | 5.20 | 1.90 | CR018654 | 4.30 | 1.70 |
| TR018618 | maxPS | 15.75 | 3.85 | maxPS | 1.70 | 0.10 |
| TR018619 | | 9.50 | 0.90 | | 21.30 | 1.70 |
| TR018620 | | 2.20 | 0.00 | | 6.60 | 2.60 |
| TR018621 | | 9.55 | 1.05 | | 9.15 | 4.65 |
| TR018622 | | 0.15 | 0.05 | | 2.55 | 1.15 |
| TR018617 | CR018647 | 4.65 | 1.75 | CR018655 | 5.00 | 0.80 |
| TR018618 | Target-2′-OMe | 12.15 | 4.25 | Target-2′-OMe | 26.85 | 2.25 |
| TR018619 | | 8.05 | 1.45 | | 26.30 | 1.00 |
| TR018620 | | 4.00 | 0.40 | | 9.55 | 0.95 |
| TR018621 | | 9.70 | 1.50 | | 15.65 | 2.85 |
| TR018622 | | 0.10 | 0.00 | | 1.25 | 0.25 |
| TR018617 | CR018648 | 7.00 | 3.10 | CR018656 | 10.50 | 0.50 |
| TR018618 | Max-2′-OMe | 23.40 | 8.00 | Max-2′-OMe | 21.10 | 1.90 |
| TR018619 | | 11.70 | 4.30 | | 25.05 | 0.65 |
| TR018620 | | 3.30 | 0.00 | | 13.90 | 0.90 |
| TR018621 | | 13.30 | 2.20 | | 23.60 | 0.70 |
| TR018622 | | 0.20 | 0.00 | | 1.25 | 0.45 |
| TR018617 | CR018649 | 1.55 | 0.05 | CR018657 | 6.55 | 0.15 |
| TR018618 | Max-2′-OMe | 14.60 | 4.10 | Max-2′-OMe | 11.65 | 0.65 |
| TR018619 | | 4.35 | 1.25 | | 29.05 | 2.35 |
| TR018620 | | 1.25 | 0.15 | | 9.40 | 1.80 |
| TR018621 | | 10.85 | 3.55 | | 20.45 | 6.65 |
| TR018622 | | 0.10 | 0.00 | | 1.70 | 0.10 |

[0999] The additional combinations of chemically modified crRNA and tracrRNA were tested to assess editing efficiency. Editing efficiency was determined for chemically modified dgRNA targeting the previously described TS47 site within the VEGFA gene. Each dgRNA contained a combination of a crRNA and a tracrRNA with chemical modifications. HEK-Nme2 cells were obtained and prepared as described in Example 2. Cells (MOI=2) were plated at a cell density of 10,000 cells per well. Cells were then transfected with dual guide RNA via the MessengerMax protocol previously described in Example 2.2 at a final concentration of 25 nM dgRNA. Duplicate samples were included in the assay. After 72 hours, gDNA was extracted from cells, prepared for NGS analysis, and NGS results analyzed as described above and in Example 1. Mean percent editing is shown in Table 15 and FIG. 11.

TABLE 15
Mean percent editing with modified crRNAs and tracrRNAs

| | CR018473 | | CR018474 | | CR018475 | | CR018476 | |
|---|---|---|---|---|---|---|---|---|
| tracrRNA | Mean | | Mean | | Mean | | Mean | |
| ID | % Edit | SD | % Edit | SD | % Edit | SD | % Edit | SD |
| TR018477 | 20.5 | 0.1 | 32.8 | 1.9 | 14.2 | 4.1 | 22.2 | 2.1 |
| TR018478 | 5.8 | 1.3 | 25.6 | 4.0 | 6.1 | 0.2 | 14.2 | 0.3 |
| TR018479 | 35.7 | 2.3 | 37.9 | 2.7 | 19.9 | 1.7 | 15.4 | 0.6 |
| TR018480 | 37.4 | 0.4 | 29.7 | 0.5 | 20.2 | 1.3 | 1.2 | 0.3 |
| TR018481 | 24.9 | 1.0 | 29.9 | 0.1 | 1.9 | 0.2 | 23.6 | 0.7 |
| TR018482 | 0.3 | 0.1 | 0.5 | 0.1 | 0.9 | 0.3 | 0.8 | 0.1 |
| TR018483 | 30.3 | 1.4 | 31.8 | 1.7 | 16.9 | 0.4 | 21.1 | 3.1 |
| TR018484 | 16.2 | 1.8 | 18.2 | 1.2 | 17.9 | 1.1 | 23.2 | 3.0 |
| TR018485 | 26.1 | 0.2 | 6.6 | 1.3 | 1.5 | 0.4 | 5.9 | 1.1 |
| TR018486 | 32.0 | 4.8 | 17.9 | 0.8 | 2.8 | 0.1 | 15.7 | 0.3 |
| TR018487 | 8.0 | 1.6 | 30.1 | 1.0 | 12.2 | 0.0 | 21.8 | 0.7 |
| TR018488 | 36.2 | 0.8 | 25.1 | 1.2 | 21.0 | 1.0 | 31.0 | 0.3 |
| TR018489 | 34.9 | 0.4 | 20.1 | 1.6 | 19.5 | 0.5 | 29.4 | 1.3 |
| TR018490 | 21.9 | 0.3 | 28.5 | 0.3 | 10.2 | 1.6 | 13.8 | 1.4 |
| TR018491 | 24.7 | 1.2 | 28.3 | 1.4 | 19.6 | 1.4 | 26.1 | 0.0 |
| TR018492 | 13.6 | 1.5 | 18.3 | 0.3 | 12.4 | 3.0 | 18.7 | 1.9 |
| TR018493 | 19.9 | 0.8 | 8.4 | 2.0 | 9.6 | 1.9 | 22.7 | 3.2 |
| TR018494 | 1.1 | 0.9 | 0.4 | 0.2 | 0.3 | 0.2 | 0.3 | 0.1 |
| TR018495 | 19.4 | 1.6 | 27.8 | 0.7 | 1.4 | 0.7 | 1.9 | 0.3 |
| TR018496 | 38.7 | 0.9 | 35.5 | 1.0 | 13.3 | 1.7 | 32.9 | 1.7 |
| TR018497 | 27.5 | 1.1 | 16.6 | 0.5 | 13.1 | 0.2 | 23.0 | 0.7 |
| TR018498 | 28.0 | 1.2 | 38.1 | 1.0 | 18.6 | 2.9 | 24.9 | 1.7 |
| TR018499 | 33.9 | 0.1 | 36.4 | 0.5 | 26.6 | 0.9 | 37.8 | 1.2 |
| TR018500 | 0.7 | 0.5 | 0.5 | 0.2 | 3.1 | 0.7 | 4.7 | 1.3 |

### Example 6.2 Evaluation of Guide Sequence Chemical Modifications in PMH

[1000] Pegylated guide RNA (pgRNA) with chemical modifications in the guide sequence were tested for editing efficacy at two distinct mouse TTR regions (Exon 1 and Exon 3) in PMH. PMH (In Vitro ADMET Laboratories) were prepared as described in Example 1. Lipofection of Nme2 Cas9 mRNA (mRNA O SEQ ID NO: 633) and gRNAs targeting two distinct loci in mouse TTR as indicated in Table 16 used pre-mixed lipid compositions as described in Example 1. Lipoplexes were used to treat cells with 100 ng/100 ul Nme2 mRNA and with gRNA at the concentrations indicated in Table 16. Cells were incubated in maintenance media+10% FBS (Corning #35-010-CF) at 37° C. for 72 hours. Post incubation, genomic DNA was isolated and NGS analysis was performed as described in Example 1.

[1001] Editing efficiency was determined for various guide modification patterns at three gRNA concentrations (3 nM, 8 nM, or 25 nM). Duplicate samples were included in the assay. Mean editing results are shown in Table 16 and FIGS. 12A-12B for test guides with the N79 pgRNA design (G023066 or G023067) that are lacking a 2′-OMe at specified nucleotide position in the target-binding region of the gRNA. Table 17 and FIGS. 12C-12D show mean percent editing for test guides with the End-Mod pgRNA designs (G023070 or G023104) with additional 2′-OMe modifications at the specified nucleotide position in the target-binding region of the gRNA. “ND” in the table represents values that could not be detected due to experimental failure.

TABLE 16
Mean percent editing for N79 pgRNAs lacking 2′-OMe modification
at the specified position in the guide sequence.

| | | | gRNA concentrations | | | | | |
|---|---|---|---|---|---|---|---|---|
| | | | 3 nM | | 8 nM | | 25 nM | |
| | | | Mean | | Mean | | Mean | |
| | Guide Sequence | | % | | % | | % | |
| Locus | Modification | Guide | Edit | SD | Edit | SD | Edit | SD |
| Exon-1 | High mod pgRNA | G023067 | ND | ND | 61.8 | 0.3 | 76.3 | 4.6 |
| | No-Mod | G023069 | 5.1 | 0.4 | 13.0 | 0.2 | 33.8 | 0.3 |
| | End-Mod | G023070 | 23.7 | 3.9 | 48.1 | 0.3 | 61.2 | 2.0 |
| | POSITION 4 | G023078 | 36.5 | 4.1 | 50.7 | 3.5 | 69.5 | 0.1 |
| | POSITION 5 | G023079 | 57.7 | 0.5 | 63.2 | 3.5 | 71.2 | 3.0 |
| | POSITION 8 | G023080 | 47.3 | 4.2 | 46.1 | 2.9 | 78.4 | 0.2 |
| | POSITION 9 | G023081 | 50.4 | 2.2 | 46.8 | 5.6 | 57.4 | 4.1 |
| | POSITION 11 | G023082 | 31.2 | 2.3 | 39.3 | 1.9 | 50.7 | 3.6 |
| | POSITION 13 | G023083 | 46.5 | 3.7 | 49.2 | 3.8 | 46.6 | 9.2 |
| | POSITION 18 | G023084 | 46.8 | 1.8 | 47.7 | 7 | 60.7 | 4.1 |
| | POSITION 22 | G023085 | 9.5 | 2.6 | 35.2 | 5.8 | 49.6 | 3.9 |
| Exon-3 | High mod pgRNA | G023066 | 38.8 | 4.0 | 79.2 | 4.2 | 88.0 | 1.0 |
| | No-Mod | G023103 | 1.3 | 0.5 | 20 | 0.2 | 37.3 | 1.6 |
| | End-Mod | G023104 | 20.3 | 4.7 | 50.1 | 4.9 | 62.1 | 5.1 |
| | POSITION 4 | G023112 | 56.7 | 3.8 | 64.3 | 3.2 | 77.2 | 2.0 |
| | POSITION 5 | G023113 | 41.0 | 8.9 | 68.4 | 1.3 | 81.8 | 1.8 |
| | POSITION 8 | G023114 | 56.3 | 2.2 | 76.8 | 14 | 87.5 | 0.5 |
| | POSITION 9 | G023115 | 59.5 | 9.0 | 63.6 | 1.9 | 80.8 | 0.9 |
| | POSITION 11 | G023116 | 49.4 | 10.3 | 49.5 | 7.1 | 67.8 | 0.2 |
| | POSITION 13 | G023117 | 49.0 | 9.4 | 55.1 | 5.7 | 70.3 | 1.2 |
| | POSITION 18 | G023118 | 52.9 | 7.3 | 56.6 | 6.0 | 74.4 | 3.4 |
| | POSITION 22 | G023119 | 21.7 | 4.1 | 30.5 | 3.3 | 40.8 | 1.2 |

ND = no data reported due to technical failure.

TABLE 17
Mean percent editing for end modified pgRNAs with an additional 2′-OMe modification
at the specified position in the target-binding region of the pgRNAs.

| | | | gRNA concentrations | | | | | |
|---|---|---|---|---|---|---|---|---|
| | | | 3 nM | | 8 nM | | 25 nM | |
| | | | Mean | | Mean | | Mean | |
| | Guide Sequence | | % | | % | | % | |
| Locus | Modification | Guide | Edit | SD | Edit | SD | Edit | SD |
| Exon-1 | High mod pgRNA | G023067 | ND | ND | 61.8 | 0.3 | 76.3 | 4.6 |
| | No-Mod | G023069 | 5.1 | 0.4 | 13.0 | 0.2 | 33.8 | 0.3 |
| | End-Mod | G023070 | 23.7 | 3.9 | 48.1 | 0.3 | 61.2 | 2.0 |
| | POSITION 4 | G023071 | 22.4 | 4.0 | 51.0 | 5.3 | 54.2 | 0.6 |
| | POSITION 5 | G023072 | 18.8 | 2.1 | 45.8 | 5.3 | 60.5 | 1.2 |
| | POSITION 8 | G023120 | 65.3 | 26 | 41.3 | 5.0 | 38.6 | 7.2 |
| | POSITION 9 | G023073 | 31.1 | 3.1 | 47.7 | 1.0 | 62.4 | 6.3 |
| | POSITION 11 | G023074 | 24.0 | 5.6 | 52.0 | 1.7 | 66.5 | 1.4 |
| | POSITION 13 | G023075 | ND | ND | 48.2 | 3.6 | 62.5 | 0.8 |
| | POSITION 18 | G023076 | 17.2 | 1.6 | 43.1 | 0.2 | 48.1 | 2.8 |
| | POSITION 22 | G023077 | 30.6 | 2.5 | 59.1 | 7.2 | ND | ND |
| Exon-3 | High mod pgRNA | G023066 | 38.8 | 4.0 | 79.2 | 4.2 | 88.0 | 1.0 |
| | No-Mod | G023103 | 1.3 | 0.5 | 20.0 | 0.2 | 37.3 | 1.6 |
| | End-Mod | G023104 | 20.3 | 4.7 | 50.1 | 4.9 | 62.1 | 5.1 |
| | POSITION 4 | G023105 | 7.0 | 1.4 | 52.6 | 6.8 | 51.6 | 2.2 |
| | POSITION 5 | G023106 | 22.8 | 4.2 | ND | ND | 63.8 | 3.4 |
| | POSITION 8 | G023122 | 34.6 | 5.4 | 53.2 | 6.5 | 66.9 | 1.9 |
| | POSITION 9 | G023107 | 19.3 | 5.1 | ND | ND | ND | ND |
| | POSITION 11 | G023108 | 27.1 | 7.5 | 49.6 | 6.8 | 50.5 | 0.7 |
| | POSITION 13 | G023109 | 13.6 | 2.8 | 41.6 | 3.4 | ND | ND |
| | POSITION 18 | G023110 | 25.1 | 8.8 | 46.2 | 3.9 | 54.1 | 1.1 |
| | POSITION 22 | G023111 | 22.3 | 6.6 | 56.8 | 1.1 | 61.2 | 3.9 |

ND = no data reported due to technical failure.

### Example 7. Base Editing with Nme2-Base Editor and Chemically Modified sgRNA in HepG2 Cells

[1002] Base editor constructs comprising an APOBEC3A deaminase domain fused to Nme2Cas9 D16A nickase were tested for base conversion efficiency with various guide designs in HepG2 cells.

[1003] HepG2 cells constitutively overexpress solute carrier family 10 member 1 (SLC10A1) (HepG2-NTCP, Seeger et al. Mol Ther Nucleic Acids. 2014 December; 3(12): e216) were thawed and resuspended in Dulbecco's Modified Eagle's Medium (DMEM) supplemented with 10% Fetal Bovine Serum (FBS) (Media Y) followed by centrifugation. The supernatant was discarded and the cells were resuspended in Media Y and plated at a density of 25,000 cells per well in a 96-well collagen coated plate (Corning, Cat. 354407) in 100 uL of Media Y.

[1004] Nme2Cas9 base editor mRNAs were prepared by in vitro transcription essentially as described in Example 1 from plasmids encoding mRNA R (2XNLS N-terminal, 1xC-terminal NLS Nme2 base editor), mRNA S (2XNLS N-terminal, NLS Nme2 base editor ORF), and mRNA T (1× C-term NLS Nme2 base editor ORF). SpyCas9 mRNA and uracil glycosylase inhibitor (UGI) mRNA (SEQ ID NO: 625) were transcribed from plasmids using the same method.

[1005] Chemically modified NmeCas9 sgRNAs targeted to NTCP, with different PAM sequences, (G020927, G020928) or VEGFA (G020073) and SpyCas9 sgRNA targeted to NTCP (G020929) were synthesized using routine methods.

[1006] Guide RNA, editor mRNA, and UGI mRNA were mixed at a 1:1:1 weight ratio with premixed transfection reagent containing Lipid A, cholesterol, DSPC, and PEG2k-DMG in a 50:38:9:3 molar ratio, respectively. Reagents were combined at a lipid amine to RNA phosphate (N:P) molar ratio of about 6.0. RNA-lipid mixture was mixed approximately 1:1 with 10% FBS media and incubated for 10 minutes. Post-incubation, the cells were treated with the RNA-lipid mixture in an 8-point, 2-fold serial dilution starting at 400 ng total editor RNA per well.

[1007] At 72 hours post-treatment, cells were lysed for NGS analysis as provided in Example 1.

[1008] Dose response of editing efficiency to guide concentration was performed in triplicate. Table 18—shows mean editing percentages calculated at each guide concentration and a calculated EC50 value. The target site in VEGFA is prone to indel formation due to high GC content. All editor mRNAs achieved the same maximum C to T editing. There were slight differences in EC50 where mRNA S outperformed mRNA R and mRNA T.

TABLE 18
Mean editing percentages in HepG2-NTCP cells at
VEGFA locus (G020073) and Nme2 base editor.

| | Nme-base | C-to-T % | | | | C-to-A/G % | | | Indel % | | |
|---|---|---|---|---|---|---|---|---|---|---|---|
| mRNA | editor (ng) | Mean | SD | n | EC50 | Mean | SD | n | Mean | SD | n |
| mRNA R | 0 | 0.20 | 0.14 | 2 | 6.86 | 0.80 | 0.00 | 2 | 0.70 | 0.14 | 2 |
| | 6.25 | 36.05 | 1.63 | 2 | | 2.30 | 0.28 | 2 | 14.25 | 0.21 | 2 |
| | 12.5 | 49.70 | 1.13 | 2 | | 2.95 | 0.49 | 2 | 16.35 | 1.06 | 2 |
| | 25 | 57.60 | 0.42 | 2 | | 2.75 | 0.07 | 2 | 17.45 | 0.21 | 2 |
| | 50 | 67.15 | 1.34 | 2 | | 2.65 | 0.07 | 2 | 17.90 | 0.14 | 2 |
| | 100 | 70.50 | 0.99 | 2 | | 2.65 | 0.07 | 2 | 18.80 | 0.28 | 2 |
| | 200 | 72.75 | 0.49 | 2 | | 2.90 | 0.57 | 2 | 18.75 | 0.49 | 2 |
| | 400 | 72.00 | 0.14 | 2 | | 3.10 | 0.14 | 2 | 20.40 | 0.99 | 2 |
| mRNA S | 0 | 0.50 | 0.00 | 1 | 3.86 | 1.00 | 0.00 | 1 | 0.60 | 0.00 | 1 |
| | 6.25 | 49.60 | 3.25 | 2 | | 2.10 | 0.14 | 2 | 14.05 | 0.21 | 2 |
| | 12.5 | 57.05 | 0.78 | 2 | | 2.50 | 0.42 | 2 | 16.50 | 0.14 | 2 |
| | 25 | 66.95 | 0.49 | 2 | | 2.40 | 0.00 | 2 | 16.25 | 0.21 | 2 |
| | 50 | 71.45 | 0.35 | 2 | | 2.40 | 0.00 | 2 | 17.25 | 0.07 | 2 |
| | 100 | 71.60 | 0.85 | 2 | | 2.55 | 0.35 | 2 | 17.90 | 0.14 | 2 |
| | 200 | 73.70 | 0.28 | 2 | | 2.65 | 0.07 | 2 | 19.00 | 0.28 | 2 |
| | 400 | 73.80 | 0.14 | 2 | | 3.05 | 0.35 | 2 | 18.70 | 0.42 | 2 |
| mRNA T | 0 | 0.55 | 0.49 | 2 | 4.84 | 1.05 | 0.21 | 2 | 0.55 | 0.07 | 2 |
| | 6.25 | 45.55 | 0.21 | 2 | | 2.60 | 0.28 | 2 | 17.15 | 0.64 | 2 |
| | 12.5 | 56.40 | 1.84 | 2 | | 2.80 | 0.00 | 2 | 19.40 | 0.14 | 2 |
| | 25 | 64.95 | 1.06 | 2 | | 3.15 | 0.35 | 2 | 19.40 | 1.70 | 2 |
| | 50 | 70.70 | 0.28 | 2 | | 3.25 | 0.21 | 2 | 20.00 | 0.71 | 2 |
| | 100 | 72.20 | 2.83 | 2 | | 2.75 | 0.21 | 2 | 19.80 | 1.56 | 2 |
| | 200 | 70.90 | 0.99 | 2 | | 3.15 | 0.35 | 2 | 19.70 | 0.85 | 2 |
| | 400 | 71.80 | 0.14 | 2 | | 3.45 | 0.21 | 2 | 20.95 | 0.35 | 2 |

### Example 8. Base Editing with Chemically Modified sgRNA in PMH

[1009] Base editor constructs comprising an APOBEC3A deaminase domain fused to Nme2Cas9 nickase were tested for base conversion efficiency with various guide designs in primary mouse hepatocytes (PMH). PMH (In Vitro ADMET Laboratories, cat #MC 148) were thawed and plated as described in Example 1. Nme2Cas9 base editor mRNAs mRNA R, mRNA 5, and mRNA T; and uracil glycosylase inhibitor (UGI) mRNA (SEQ ID NO: 625) were prepared as described in Example 1 and paired with a series of chemically modified sgRNA targeted to mouse TTR and screened at a single dose of 128 ng of base editor mRNA. At 72 hours post-treatment, cells were lysed for NGS analysis as provided in Example 1. The mean editing of representative guides (ratio of edit types) is shown in Table 19.

TABLE 19
Mean editing percentages in PMH cells using modified gRNAs
targeting the TTR locus and an Nme2 base editor.

| | | C-to-T % | | | C-to-A/G % | | | Indel % | | |
|---|---|---|---|---|---|---|---|---|---|---|
| mRNA | Guide | Mean | SD | N | Mean | SD | N | Mean | SD | N |
| mRNA R | G021237 | 69.00 | 5.94 | 2 | 3.65 | 1.63 | 2 | 9.00 | 3.39 | 2 |
| | G021249 | 47.15 | 2.33 | 2 | 1.20 | 0.14 | 2 | 1.45 | 1.34 | 2 |
| | G021321 | 7.25 | 0.92 | 2 | 0.25 | 0.21 | 2 | 91.25 | 0.92 | 2 |
| mRNA S | G021237 | 76.75 | 1.34 | 2 | 4.35 | 1.48 | 2 | 7.95 | 1.34 | 2 |
| | G021249 | 54.05 | 4.17 | 2 | 1.20 | 0.28 | 2 | 1.60 | 0.42 | 2 |
| | G021321 | 0.50 | n/a | 1 | 0.10 | n/a | 1 | 99.00 | n/a | 1 |
| mRNA T | G021237 | 73.55 | 5.44 | 2 | 5.15 | 2.47 | 2 | 12.50 | 1.70 | 2 |
| | G021249 | 53.30 | 5.52 | 2 | 1.05 | 0.21 | 2 | 2.15 | 1.63 | 2 |
| | G021321 | 7.05 | 1.20 | 2 | 0.55 | 0.21 | 2 | 90.40 | 2.97 | 2 |

n/a = SD is not applicable when only 1 replicate is reported.

### Example 9. Nme2-mRNA Studies

### Example 9.1—In Vitro Editing in Primary Mouse Hepatocytes

[1010] Messenger mRNAs encoding Nme2Cas9 ORFs with different NLS placements were assayed for editing efficiency in primary mouse hepatocytes (PMH).

[1011] PMH were prepared as described in Example 1. Lipofection was performed using Lipofectamine MessengerMAX Transfection Reagent (Invitrogen LMRNA001) according to the manufacturer's protocol to transform cells with 100 nM sgRNA G020361 targeting mouse PCSK9 and with mRNA at the concentrations listed in Table 20. Triplicate samples were included in the assay. After 72 hours incubation at 37° C. in Maintenance Media, cells were harvested and NGS analysis was performed as described in Example 1. Mean editing results with standard deviation (SD) are shown in Table 20 and FIG. 13.

TABLE 20
Mean editing percentage in at the PCSK9 locus in PMH

| | mRNA | | |
|---|---|---|---|
| | Concentration | Mean % | |
| Construct | (ng/uL) | editing | SD |
| mRNA H | 2.00 | 0.07 | 0.05 |
| SEQ ID NO: 626 | 0.66 | 0.07 | 0.05 |
| | 0.22 | 0.03 | 0.05 |
| | 0.07 | 0.03 | 0.05 |
| | 0.03 | 0.03 | 0.05 |
| | 0.008 | 0.00 | 0.00 |
| | 0.003 | 0.00 | 0.00 |
| | 0.00 | 0.05 | 0.05 |
| mRNA I | 2.00 | 22.53 | 1.59 |
| SEQ ID NO: 627 | 0.66 | 10.37 | 2.25 |
| | 0.22 | 0.80 | 0.22 |
| | 0.07 | 0.07 | 0.05 |
| | 0.03 | 0.07 | 0.05 |
| | 0.008 | 0.03 | 0.05 |
| | 0.003 | 0.03 | 0.05 |
| | 0.00 | 0.20 | 0.28 |
| mRNA J | 2.00 | 26.30 | 0.86 |
| SEQ ID NO: 628 | 0.66 | 10.07 | 1.27 |
| | 0.22 | 0.93 | 0.33 |
| | 0.07 | 0.03 | 0.05 |
| | 0.03 | 0.03 | 0.05 |
| | 0.008 | 0.03 | 0.05 |
| | 0.003 | 0.03 | 0.05 |
| | 0.00 | 0.05 | 0.05 |
| mRNA K | 2.00 | 14.20 | 1.84 |
| SEQ ID NO: 629 | 0.66 | 6.70 | 1.16 |
| | 0.22 | 0.53 | 0.17 |
| | 0.07 | 0.07 | 0.09 |
| | 0.03 | 0.03 | 0.05 |
| | 0.008 | 0.00 | 0.00 |
| | 0.003 | 0.00 | 0.00 |
| | 0.00 | 0.05 | 0.05 |
| mRNA L | 2.00 | 23.30 | 0.80 |
| SEQ ID NO: 630 | 0.66 | 10.57 | 1.54 |
| | 0.22 | 0.70 | 0.42 |
| | 0.7 | 0.07 | 0.05 |
| | 0.03 | 0.07 | 0.05 |
| | 0.008 | 0.07 | 0.05 |
| | 0.003 | 0.03 | 0.05 |
| | 0.00 | 0.05 | 0.05 |
| mRNA N | 2.00 | 22.63 | 2.25 |
| SEQ ID NO: 631 | 0.66 | 11.00 | 0.00 |
| | 0.22 | 0.97 | 0.19 |
| | 0.07 | 0.17 | 0.09 |
| | 0.03 | 0.03 | 0.05 |
| | 0.008 | 0.03 | 0.05 |
| | 0.003 | 0.00 | 0.00 |
| | 0.00 | 0.05 | 0.05 |
| mRNA C | 2.00 | 19.90 | 0.16 |
| SEQ ID NO: 632 | 0.66 | 8.40 | 2.20 |
| | 0.22 | 0.70 | 0.22 |
| | 0.07 | 0.03 | 0.05 |
| | 0.03 | 0.00 | 0.00 |
| | 0.008 | 0.03 | 0.05 |
| | 0.003 | 0.00 | 0.00 |
| | 0.00 | 0.00 | 0.00 |

### Example 9.2—Dose Response of Nme2 ORF Variants and Guides with Chemical Modification Variations

[1012] Messenger mRNAs encoding Nme2Cas9 ORFs with different NLS configurations were assayed for editing efficiency in primary human hepatocytes (PHH) and HEK-293 cells. Assays were performed using gRNAs with identical guide sequences targeting VEGFA locus TS47 and gRNAs had various lengths and chemical modification patterns. PHH cells prepared as described in Example 1. HEK293 cells were thawed and plated at a density of 30,000 cells/well in 96 well plates in DMEM (Corning, 10-013-CV) with 10% FBS and incubated for 24 hours. Lipofection was performed using Lipofectamine MessengerMAX Transfection Reagent (Invitrogen LMRNA001) according to the manufacturer's protocol. A dose response 1:3 dilution series starting at a top dose of 100 nM gRNA and 1 ng/uL mRNA, was used to transform cells with gRNA at the concentrations listed in Tables LS3.1 and LS3.2. Replicate samples were included in the assay. After 72 hours incubation at 37° C., cells were harvested and NGS analysis was performed as described in Example 1. Mean editing results with standard deviation (SD) are shown in Table 21A and FIGS. 14A-14C for HEK cells and Table 21B and FIGS. 14D-14F for PHH.

TABLE 21A
Mean percent editing in HEK cells

| | gRNA | G020055 | | | G020073 | | |
|---|---|---|---|---|---|---|---|
| mRNA | [nM] | Mean | SD | N | Mean | SD | N |
| mRNA C | 100 | 76.05 | 5.18 | 4 | 90.50 | 4.15 | 4 |
| | 33.33 | 61.68 | 14.86 | 4 | 75.55 | 8.65 | 4 |
| | 11.11 | 32.93 | 8.59 | 4 | 63.53 | 11.92 | 4 |
| | 3.70 | 14.63 | 4.08 | 4 | 39.88 | 2.40 | 4 |
| | 1.23 | 5.95 | 1.42 | 4 | 13.00 | 5.36 | 4 |
| | 0.41 | 3.35 | 0.60 | 4 | 6.03 | 1.05 | 4 |
| | 0.14 | 2.05 | 0.50 | 4 | 3.65 | 0.47 | 4 |
| | 0.00 | 1.50 | 0.22 | 4 | 1.30 | 0.22 | 4 |
| mRNA I | 100 | 85.55 | 7.06 | 4 | 88.08 | 4.90 | 4 |
| | 33.33 | 65.33 | 17.06 | 4 | 77.13 | 4.78 | 4 |
| | 11.11 | 34.98 | 12.93 | 4 | 48.63 | 4.83 | 4 |
| | 3.70 | 21.25 | 13.09 | 4 | 22.43 | 6.49 | 4 |
| | 1.23 | 8.03 | 8.06 | 4 | 9.80 | 2.12 | 4 |
| | 0.41 | 2.83 | 1.94 | 4 | 5.55 | 0.94 | 4 |
| | 0.14 | 2.15 | 0.83 | 4 | 2.45 | 0.60 | 4 |
| mRNA J | 100 | 87.03 | 3.79 | 4 | 90.93 | 1.14 | 4 |
| | 33.33 | 72.25 | 4.18 | 4 | 72.08 | 3.88 | 4 |
| | 11.11 | 40.05 | 5.01 | 4 | 42.83 | 9.02 | 4 |
| | 3.70 | 11.65 | 5.34 | 4 | 16.63 | 6.64 | 4 |
| | 1.23 | 5.78 | 0.86 | 4 | 7.00 | 1.47 | 4 |
| | 0.41 | 2.60 | 0.42 | 4 | 4.50 | 2.76 | 4 |
| | 0.14 | 1.53 | 0.50 | 4 | 1.78 | 0.24 | 4 |
| | 0.00 | 1.33 | 0.13 | 4 | 1.53 | 0.25 | 4 |

TABLE 21B
Mean percent editing in PHH cells

| | gRNA | G020055 | | | G020073 | | |
|---|---|---|---|---|---|---|---|
| mRNA | [nM] | Mean | SD | N | Mean | SD | N |
| mRNA C | 100 | 27.70 | 4.29 | 3 | 31.43 | 3.63 | 3 |
| | 33.33 | 32.98 | 5.10 | 4 | 31.58 | 2.49 | 4 |
| | 11.11 | 25.55 | 2.53 | 4 | 33.58 | 1.06 | 4 |
| | 3.70 | 13.80 | 3.68 | 4 | 19.38 | 3.86 | 4 |
| | 1.23 | 6.20 | 0.68 | 4 | 12.83 | 3.60 | 4 |
| | 0.41 | 2.70 | 0.81 | 4 | 6.35 | 1.41 | 4 |
| | 0.14 | 2.25 | 0.66 | 4 | 3.18 | 1.05 | 4 |
| | 0.00 | 1.65 | 0.24 | 4 | 1.50 | 0.18 | 4 |
| mRNA I | 100 | 25.00 | 2.73 | 4 | 29.88 | 1.67 | 4 |
| | 33.33 | 25.73 | 3.69 | 4 | 26.60 | 4.95 | 4 |
| | 11.11 | 26.08 | 3.23 | 4 | 22.98 | 3.09 | 4 |
| | 3.70 | 14.55 | 3.74 | 4 | 19.03 | 3.55 | 4 |
| | 1.23 | 7.65 | 0.70 | 4 | 7.28 | 3.41 | 4 |
| | 0.41 | 4.18 | 0.97 | 4 | 4.15 | 0.62 | 4 |
| | 0.14 | 2.18 | 0.15 | 4 | 2.83 | 0.93 | 4 |
| | 0.00 | 1.40 | 0.12 | 4 | 1.35 | 0.17 | 4 |
| mRNA J | 100 | 27.90 | 1.57 | 4 | 36.38 | 5.06 | 4 |
| | 33.33 | 26.50 | 3.59 | 4 | 32.95 | 2.27 | 4 |
| | 11.11 | 21.23 | 3.98 | 4 | 29.88 | 3.59 | 4 |
| | 3.70 | 14.85 | 2.37 | 4 | 14.88 | 2.81 | 4 |
| | 1.23 | 6.78 | 2.29 | 4 | 6.43 | 0.74 | 4 |
| | 0.41 | 2.73 | 1.35 | 4 | 3.13 | 0.49 | 4 |
| | 0.14 | 2.63 | 1.69 | 4 | 2.45 | 0.73 | 4 |
| | 0.00 | 1.40 | 0.12 | 4 | 1.50 | 0.16 | 4 |

### Example 9.3—Dose Response of Nme2 NLS Variants Using LNPs in PMH

[1013] Messenger mRNAs encoding Nme2Cas9 ORFs with different NLS placements were assayed for editing efficiency in primary mouse hepatocytes (PMH). The assay tested guides targeting the mouse TTR locus and included both sgRNA and pgRNA designs.

[1014] PMH were prepared as in Example 1. LNPs were generally prepared as described in Example 1 with a single RNA species as cargo, as indicated in Table 22. LNPs were prepared with the lipid composition of 50/9/38/3, expressed as the molar ratio of ionizable Lipid A/cholesterol/DSPC/PEG, respectively. The LNPs were formulated with a lipid amine to RNA phosphate (N:P) molar ratio of about 6.

[1015] Cells were treated with 60 ng/100 μl LNP containing gRNA by RNA weight and with LNP containing mRNA as indicated in Table 22. Cells were incubated for 72 hours at 37° C. in Williams' E Medium (Gibco, A1217601) with maintenance supplements and 1000 fetal bovine serum. After 72 hours incubation at 37° C., cells were harvested and editing was assessed by NGS as described in Example 1. Mean percent editing data is shown in Table 22 and FIG. 15.

TABLE 22
Mean percent editing at the mouse TTR
locus in primary mouse hepatocytes.

| | mRNA LNP | Mean % | | |
|---|---|---|---|---|
| Sample | (ng RNA) | Editing | SD | N |
| mRNA P (2 × NLS) | 40.000 | 92.30 | 0.85 | 3 |
| G021536 | 13.330 | 82.67 | 1.61 | 3 |
| | 4.440 | 62.27 | 2.96 | 3 |
| | 1.480 | 32.80 | 4.54 | 3 |
| | 0.490 | 11.23 | 1.37 | 3 |
| | 0.160 | 3.40 | 0.71 | 3 |
| | 0.050 | 0.80 | 0.22 | 3 |
| | 0.018 | 0.30 | 0.08 | 3 |
| | 0.006 | 0.20 | 0.08 | 3 |
| | 0.002 | 0.13 | 0.05 | 3 |
| | 0.001 | 0.13 | 0.05 | 3 |
| | 0.000 | 0.10 | 0.00 | 3 |
| mRNA P (2 × NLS) | 40.000 | 96.17 | 0.12 | 3 |
| G021844 (pgRNA) | 13.330 | 91.83 | 0.34 | 3 |
| | 4.440 | 75.37 | 6.80 | 3 |
| | 1.480 | 44.53 | 13.11 | 3 |
| | 0.490 | 18.30 | 5.77 | 3 |
| | 0.160 | 5.50 | 1.43 | 3 |
| | 0.050 | 1.63 | 0.71 | 3 |
| | 0.018 | 0.33 | 0.05 | 3 |
| | 0.006 | 0.17 | 0.05 | 3 |
| | 0.002 | 0.07 | 0.05 | 3 |
| | 0.001 | 0.10 | 0.00 | 3 |
| | 0.000 | 0.07 | 0.05 | 3 |
| mRNA M (1 × NLS) | 40.000 | 84.27 | 1.23 | 3 |
| G021536 | 13.330 | 66.23 | 5.39 | 3 |
| | 4.440 | 33.80 | 5.14 | 3 |
| | 1.480 | 10.17 | 5.51 | 3 |
| | 0.490 | 4.20 | 0.92 | 3 |
| | 0.160 | 1.10 | 0.45 | 3 |
| | 0.050 | 0.33 | 0.17 | 3 |
| | 0.018 | 0.23 | 0.09 | 3 |
| | 0.006 | 0.10 | 0.00 | 3 |
| | 0.002 | 0.10 | 0.00 | 3 |
| | 0.001 | 0.10 | 0.00 | 3 |
| | 0.000 | 0.07 | 0.05 | 3 |
| mRNA M (1 × NLS) | 40.000 | 88.83 | 0.37 | 3 |
| G021844 (pgRNA) | 13.330 | 74.37 | 4.63 | 3 |
| | 4.440 | 39.00 | 3.72 | 3 |
| | 1.480 | 16.40 | 2.52 | 3 |
| | 0.490 | 4.03 | 0.77 | 3 |
| | 0.160 | 1.27 | 0.05 | 3 |
| | 0.050 | 0.23 | 0.05 | 3 |
| | 0.018 | 0.20 | 0.08 | 3 |
| | 0.006 | 0.10 | 0.00 | 3 |
| | 0.002 | 0.10 | 0.00 | 3 |
| | 0.001 | 0.10 | 0.00 | 3 |
| | 0.000 | 0.10 | 0.00 | 3 |

### Example 9.4—Dose Response of Nme2 NLS Variants Using LNPs in PMH

[1016] Messenger mRNAs encoding Nme2Cas9 ORFs with different NLS placements were assayed for editing efficiency in primary mouse hepatocytes (PMH).

[1017] PMH (Gibco, MC148) were prepared as described in Example 1. LNPs were generally prepared as described in Example 1 with a single RNA species as cargo. LNPs were prepared with the lipid composition of 50/9/38/3, expressed as the molar ratio of ionizable Lipid A/cholesterol/DSPC/PEG, respectively. The LNPs were formulated with a lipid amine to RNA phosphate (N:P) molar ratio of about 6.

[1018] Cells were treated with 30 ng by RNA weight/100 μl of LNP containing gRNA G021844 and with LNP containing mRNA as indicated in Table LS4. Cells were incubated for 24 hours in Williams' E Medium (Gibco, A1217601) with maintenance supplements and 1000 fetal bovine serum. After 72 hours incubation, cells were harvested and editing was assessed by NGS as described in Example 1. Mean percent editing data is shown in Table 23 and FIG. 16.

TABLE 23
Mean editing percentage in PMH treated with LNPs.

| | mRNA LNP | | | | EC₅₀ |
|---|---|---|---|---|---|
| mRNA | (ng/uL) | Mean | SD | N | (ng/uL) |
| mRNA C | 0.30 | 86.30 | 4.46 | 3 | 0.0082 |
| | 0.10 | 84.17 | 5.52 | | |
| | 0.03 | 75.80 | 1.91 | | |
| | 0.01 | 43.90 | 14.36 | | |
| | 0.004 | 34.03 | 8.64 | | |
| | 0.001 | 15.63 | 4.35 | | |
| | 0.0004 | 6.17 | 2.41 | | |
| | 0.0001 | 3.47 | 0.62 | | |
| | 0.00005 | 2.37 | 0.34 | | |
| | 0.00002 | 3.00 | 0.64 | | |
| | 0.00001 | 2.60 | 0.57 | | |
| | 0.00 | 2.70 | 0.16 | | |
| mRNA J | 0.30 | 91.30 | 2.92 | 3 | 0.0053 |
| | 0.10 | 89.60 | 4.23 | | |
| | 0.03 | 80.93 | 8.17 | | |
| | 0.01 | 62.85 | 14.35 | | |
| | 0.004 | 39.95 | 5.15 | | |
| | 0.001 | 16.70 | 3.79 | | |
| | 0.0004 | 7.73 | 2.98 | | |
| | 0.0001 | 4.23 | 0.95 | | |
| | 0.00005 | 2.80 | 0.70 | | |
| | 0.00002 | 3.23 | 0.54 | | |
| | 0.00001 | 2.67 | 0.48 | | |
| | 0.00 | 3.60 | 0.57 | | |
| mRNA Q | 0.30 | 90.67 | 4.40 | 3 | 0.0065 |
| | 0.10 | 86.77 | 5.43 | | |
| | 0.03 | 80.27 | 6.65 | | |
| | 0.01 | 56.90 | 5.48 | | |
| | 0.004 | 35.45 | 1.35 | | |
| | 0.001 | 12.63 | 3.16 | | |
| | 0.0004 | 5.17 | 0.56 | | |
| | 0.0001 | 2.73 | 0.17 | | |
| | 0.00005 | 2.97 | 0.41 | | |
| | 0.00002 | 2.73 | 0.21 | | |
| | 0.00001 | 2.87 | 0.56 | | |
| | 0.00 | 2.43 | 0.82 | | |
| mRNA N | 0.30 | 93.93 | 2.20 | 3 | 00045 |
| | 0.10 | 90.97 | 1.77 | | |
| | 0.03 | 82.80 | 8.24 | | |
| | 0.01 | 68.67 | 10.18 | | |
| | 0.004 | 42.07 | 2.25 | | |
| | 0.001 | 24.13 | 4.21 | | |
| | 0.0004 | 10.60 | 0.94 | | |
| | 0.0001 | 4.67 | 0.66 | | |
| | 0.00005 | 3.30 | 1.84 | | |
| | 0.00002 | 3.37 | 0.69 | | |
| | 0.00001 | 2.53 | 0.90 | | |
| | 0.00 | 2.33 | 1.48 | | |
| mRNA P | 0.30 | 94.47 | 1.04 | 3 | 0.0036 |
| | 0.10 | 95.03 | 0.96 | | |
| | 0.03 | 91.27 | 2.36 | | |
| | 0.01 | 74.77 | 6.91 | | |
| | 0.004 | 50.57 | 4.89 | | |
| | 0.001 | 22.67 | 0.25 | | |
| | 0.0004 | 8.27 | 0.74 | | |
| | 0.0001 | 4.93 | 0.70 | | |
| | 0.00005 | 3.37 | 0.74 | | |
| | 0.00002 | 2.93 | 0.68 | | |
| | 0.00001 | 2.87 | 0.05 | | |
| | 0.00 | 2.87 | 0.45 | | |
| mRNA M | 0.30 | 92.00 | 0.80 | 3 | 0.0093 |
| | 0.10 | 91.40 | 1.90 | | |
| | 0.03 | 79.70 | 0.70 | | |
| | 0.01 | 53.10 | 6.80 | | |
| | 0.004 | 22.47 | 14.28 | | |
| | 0.001 | 8.20 | 4.20 | | |
| | 0.0004 | 4.57 | 1.57 | | |
| | 0.0001 | 2.73 | 0.31 | | |
| | 0.00005 | 3.07 | 0.21 | | |
| | 0.00002 | 2.93 | 0.09 | | |
| | 0.00001 | 2.77 | 0.66 | | |
| | 0.00 | 3.47 | 1.09 | | |
| mRNA O | 0.30 | 89.40 | 7.00 | 3 | 0.0042 |
| | 0.10 | 86.83 | 12.52 | | |
| | 0.03 | 78.17 | 15.41 | | |
| | 0.01 | 64.83 | 12.48 | | |
| | 0.004 | 47.33 | 9.03 | | |
| | 0.001 | 20.67 | 7.12 | | |
| | 0.0004 | 8.60 | 2.95 | | |
| | 0.0001 | 2.47 | 1.33 | | |
| | 0.00005 | 4.13 | 0.37 | | |
| | 0.00002 | 2.80 | 0.62 | | |
| | 0.00001 | 11.13 | 231. | | |
| | 0.00 | 6.13 | 2.16 | | |

### Example 10—NmeCas9 Protein Expression

### Example 10.1 Protein Expression in Primary Human Hepatocytes

[1019] To quantify expression of each mRNA construct, mRNA and protein expression levels were measured following LNP delivery of mRNAs encoding either SpyCas9 or NmeCas9 to primary human hepatocytes.

[1020] PHH cells were prepared as described in Example 1. LNPs were generally prepared as described in Example 1 with a single RNA species as cargo. The LNPs contained Lipid A, cholesterol, DSPC, and PEG2k-DMG in a 50:38:9:3 molar ratio, respectively. The LNPs were formulated with a lipid amine to RNA phosphate (N:P) molar ratio of about 6.

[1021] Cells were dosed with one LNP containing mRNA (mRNA only), or two LNPs containing either mRNA or gRNA. Each LNP was applied to cells at 16.7 ng total RNA cargo/100 μl. Upon treatment with LNPs, cells were incubated for 24 hours at 37° C. in Williams' E Medium (Gibco, A1217601) with maintenance supplements and 10% fetal bovine serum. After 24 hours incubation, cells were harvested and expression was quantified via Nano-Glo HiBiT lytic detection system (Promega, N3030) following manufacturer's instructions. Raw luminescence was normalized to a standard curve using HiBiT Control Protein (Promega, N3010). Protein expression of different Cas9 variants, shown in Table 24 and FIG. 17, was normalized to the expression of SpyCas9 measured in corresponding hepatocytes delivered with only the SpyCas9 mRNA. Consistent with the data shown in Table 24, protein expression from these same constructs was higher for the NmeCas9 construct than for the SpyCas9 construct when detected by western blot with an anti-HiBiT antibody from PHH cell extracts or as measured by HiBiT detection in PMH, PCH, PHH, and PRH cells.

TABLE 24
Mean fold-expression of Cas9 variants as compared to SpyCas9
expression in corresponding hepatocytes delivered with
only the SpyCas9 mRNA, as measured by the HiBiT assay

Fold-expression

| mRNA | gRNA | Cell Type | Mean | N |
|---|---|---|---|---|
| Spy Cas9 | None | PMH | 1 | 2 |
| mRNA | | PRH | 1 | 3 |
| | | PCH | 1 | 3 |
| | | PHH | 1 | 3 |
| | G000502 | PMH | 0.8 | 2 |
| | | PRH | 2.7 | 3 |
| | | PCH | 1.8 | 3 |
| | | PHH | 0.6 | 3 |
| Nme2 Cas9 | None | PMH | 6.8 | 2 |
| mRNA M | | PRH | 19.2 | 3 |
| | | PCH | 7.3 | 3 |
| | | PHH | 4.3 | 3 |
| | G021536 | PMH | 5.1 | 2 |
| | | PRH | 11.5 | 3 |
| | | PCH | 4.1 | 3 |
| | | PHH | 3.0 | 3 |

### Example 10.2: Protein Expression in T Cells

[1022] To quantify expression of each mRNA construct, protein expression levels were measured following LNP delivery of mRNAs encoding either SpyCas9 or Nme2Cas9 to T Cells.

[1023] Healthy human donor apheresis was obtained commercially (Hemacare, Cat #). T cells from two donors (W106 and W864) were isolated by negative selection using the EasySep Human T cell Isolation Kit (Stem Cell Technology, Cat. 17951) on the MultiMACS Cell24 Separator Plus instrument according to manufacturer instruction. Isolated T cells were cryopreserved in CS10 freezing media (Cryostor, Cat., 07930) for future use.

[1024] Upon thaw, T cells were cultured in complete T cell growth media composed of CTS OpTmizer Base Media (CTS OpTmizer Media (Gibco, A1048501) with 1× GlutaMAX, 10 mM HEPES buffer, 1% Penicillin/Streptomycin)) supplemented with cytokines (200 IU/ml IL2, 5 ng/ml IL7 and 5 ng/ml IL15) and 2.5% human serum (Gemini, 100-512). After overnight rest at 37° C., T cells at a density of 1e6/mL were activated with T cell TransAct Reagent (1:100 dilution, Miltenyi) and incubated in a tissue culture incubator for 48 hours.

[1025] The activated T cells were treated with LNPs delivering mRNAs encoding Nme2-mRNA or Spy mRNA with HiBiT tags. LNPs were generally prepared as in Example 1. LNPs were formulated with a lipid amine to RNA phosphate (N:P) molar ratio of about 6. The LNPs encapsulating Nme2Cas9 mRNAs used Lipid A, cholesterol, DSPC, and PEG2k-DMG in a molar ratio of 50:38:9:3 respectively. The LNP encapsulating SpyCas9 mRNA used Lipid A, cholesterol, DSPC, and PEG2k-DMG in a 50:10:38.5:1.5 molar ratio, respectively. No guide RNA was provided in this experiment.

[1026] Immediately prior to LNP treatment of T cells, LNPs were preincubated at 37° C. for 5 minutes at an LNP concentration of 13.33 ug/ml total RNA with 10 ug/mL ApoE3 (Peprotech, Cat #350-02) in complete T cell media supplemented with cytokines (200 IU/ml IL2 (Peprotech, Cat. 200-02), 5 ng/ml IL7 (Peprotech, Cat. 200-07), and 5 ng/ml IL15 (Peprotech, Cat. 200-15) and 2.5% human serum (Gemini, 100-512). After incubation, LNPs were then mixed 1:1 by volume with T cells in the complete T cell media with cytokines used for ApoE incubation. T cells were harvested for protein expression analysis at 24 h, 48 h, and 72 h post LNP treatment. T cells were lysed by Nano-Glo® HiBiT Lytic Assay (Promega) and Cas9 protein levels quantified via Nano-Glo® Nano-Glo HiBiT Extracellular Detection System (Promega, Cat. N2420) following the manufacturer's instructions. Luminescence was measured using the Biotek Neo2 plate reader. Linear regression was plotted on GraphPad using the protein number and luminescence readouts from the standard controls, forcing the line to go through X=0, Y=0. Used the Y=ax+0 equation to calculate number of proteins per lysate.

[1027] Samples were normalized to the mean of SpyCas9 at 0.83 ug/ml LNP dose. Tables 25A-25B, and FIGS. 18A-18F show the relative Cas9 protein expression in activated cells when mRNA at 24, 48, and 72 hours post LNP treatment in Donor 1 or Donor 2. Cas9 was expressed in a dose dependent manner in activated T cells. Protein expression was higher from Nme2Cas9 samples in comparison to the SpyCas9 sample in activated T cells.

TABLE 25A
Protein expression normalized to the mean
SpyCas9 0.83 ug/ml sample for donor 1

| | | T cell Donor 1 | | | | | |
|---|---|---|---|---|---|---|---|
| Timepoint | LNP | mRNA P | | mRNA M | | Spy Cas9 | |
| (hours) | (ug/mL) | Mean | N | Mean | N | Mean | N |
| 24 h | 6.67 | 89.3 | 2 | 86.5 | 2 | 26.5 | 2 |
| | 3.33 | 67.7 | 2 | 50.3 | 2 | 11.3 | 2 |
| | 1.67 | 32.4 | 2 | 13.5 | 2 | 4.4 | 2 |
| | 0.83 | 7.3 | 2 | 2.9 | 2 | 1.0 | 2 |
| | 0.42 | 1.6 | 2 | 0.8 | 2 | 0.2 | 2 |
| | 0.21 | 0.4 | 2 | 0.3 | 2 | 0.1 | 2 |
| | 0.10 | 0.2 | 2 | 0.1 | 2 | 0.0 | 2 |
| | 0.00 | 0.0 | 2 | 0.0 | 2 | 0.0 | 2 |
| 48 h | 6.67 | 657.2 | 2 | 987.0 | 2 | 165.9 | 2 |
| | 3.33 | 487.4 | 2 | 551.0 | 2 | 58.5 | 2 |
| | 1.67 | 271.0 | 2 | 165.1 | 2 | 21.4 | 2 |
| | 0.83 | 64.5 | 2 | 32.3 | 2 | 4.3 | 2 |
| | 0.42 | 11.8 | 2 | 7.8 | 2 | 1.0 | 2 |
| | 0.21 | 3.2 | 2 | 2.6 | 2 | 0.1 | 2 |
| | 0.10 | 1.1 | 2 | 0.7 | 2 | 0.1 | 2 |
| | 0.00 | 0.0 | 2 | 0.0 | 2 | 0.0 | 2 |
| 72 h | 6.67 | 53.8 | 2 | 125.6 | 2 | 24.6 | 2 |
| | 3.33 | 40.8 | 2 | 75.6 | 2 | 11.6 | 2 |
| | 1.67 | 23.1 | 2 | 25.0 | 2 | 3.5 | 2 |
| | 0.83 | 5.6 | 2 | 4.0 | 2 | 1.0 | 2 |
| | 0.42 | 1.0 | 2 | 1.3 | 2 | 0.2 | 2 |
| | 0.21 | 0.2 | 2 | 0.4 | 2 | 0.0 | 2 |
| | 0.10 | 0.2 | 2 | 0.0 | 2 | 0.1 | 2 |
| | 0.00 | 0.0 | 2 | 0.0 | 2 | 0.0 | 2 |

TABLE 25B
Protein expression normalized to the mean
SpyCas9 0.83 ug/ml sample for donor 2

| | | T cell Donor 2 | | | | | |
|---|---|---|---|---|---|---|---|
| Timepoint | LNP | mRNA P | | mRNA M | | SpyCas9 | |
| (hours) | (ug/mL) | Mean | SD | Mean | SD | Mean | SD |
| 24 h | 6.67 | 151.5 | 2 | 134.0 | 2 | 36.2 | 2 |
| | 3.33 | 98.2 | 2 | 64.5 | 2 | 17.2 | 2 |
| | 1.67 | 37.6 | 2 | 19.4 | 2 | 4.9 | 2 |
| | 0.83 | 10.4 | 2 | 4.5 | 2 | 1.0 | 2 |
| | 0.42 | 2.4 | 2 | 1.0 | 2 | 0.2 | 2 |
| | 0.21 | 0.7 | 2 | 0.4 | 2 | 0.1 | 2 |
| | 0.10 | 0.3 | 2 | 0.2 | 2 | 0.0 | 2 |
| | 0.00 | 0.0 | 2 | 0.0 | 2 | 0.0 | 2 |
| 48 h | 6.67 | 713.6 | 2 | 1067.3 | 2 | 119.0 | 2 |
| | 3.33 | 507.5 | 2 | 587.1 | 2 | 54.9 | 2 |
| | 1.67 | 229.0 | 2 | 149.2 | 2 | 15.9 | 2 |
| | 0.83 | 59.1 | 2 | 33.8 | 2 | 3.6 | 2 |
| | 0.42 | 10.5 | 2 | 8.3 | 2 | 1.0 | 2 |
| | 0.21 | 3.1 | 2 | 2.8 | 2 | 0.3 | 2 |
| | 0.10 | 1.0 | 2 | 1.9 | 2 | 0.2 | 2 |
| | 0.00 | 0.0 | 2 | 0.2 | 2 | 0.0 | 2 |
| 72 h | 6.67 | 53.8 | 2 | 108.2 | 2 | 17.1 | 2 |
| | 3.33 | 40.7 | 2 | 60.5 | 2 | 8.3 | 2 |
| | 1.67 | 19.3 | 2 | 18.2 | 2 | 3.1 | 2 |
| | 0.83 | 4.7 | 2 | 3.8 | 2 | 1.0 | 2 |
| | 0.42 | 1.3 | 2 | 1.4 | 2 | 0.3 | 2 |
| | 0.21 | 0.4 | 2 | 0.4 | 2 | 0.1 | 2 |
| | 0.10 | 0.3 | 2 | 0.0 | 2 | 0.4 | 2 |
| | 0.00 | 0.0 | 2 | 0.1 | 2 | 0.0 | 2 |

### Example 11. In Vivo Editing in Mouse Liver Using Lipid Nanoparticles (LNPs)

[1028] The LNPs used in all in vivo studies were formulated as described in Example 1. Deviations from the protocol are noted in the respective Example. Transport and storage solution (TSS) used in LNP preparation was dosed in the experiment as a vehicle-only negative control.

### In Vivo Editing in the Mouse Model

[1029] Selected guide designs were tested for editing efficiency in vivo. CD-1 female mice, ranging 6-10 weeks of age were used in each study involving mice. Animals were weighed pre-dose. LNPs were formulated generally as described in Example 1. LNPs contained ionizable Lipid A, cholesterol, DSPC, and PEG2k-DMG in a 50:38:9:3 molar ratio, respectively. The lipid nucleic acid assemblies were formulated with a lipid amine to RNA phosphate (N:P) molar ratio of about 6.

[1030] LNPs were dosed via the lateral tail vein at a volume of 0.2 mL per animal (approximately 10 mL per kilogram body weight). Body weight was measured at twenty-four hours post-administration. About 6-7 days after LNP delivery, animals were euthanized by exsanguination under isoflurane anesthesia post-dose. Blood was collected via cardiac puncture into serum separator tubes. For studies involving in vivo editing, liver tissue was collected from the left medial lobe from each animal for DNA extraction and analysis.

[1031] For the in vivo studies, genomic DNA was extracted from tissue using a bead-based extraction kit, e.g., the Zymo Quick-DNA 96 kit (Zymo Research, Cat. #D3010) according to the manufacturer's protocol. NGS analysis was performed as described in Example 1.

### Transthyretin (TTR) ELISA Analysis Used in Animal Studies

[1032] Blood was collected, and the serum was isolated as described above. The total TTR serum levels were determined using a Mouse Prealbumin (Transthyretin) ELISA Kit (Aviva Systems Biology, Cat. OKIA00111). Kit reagents and standards were prepared according to the manufacturer's protocol. Mouse serum was diluted to a final dilution of 10,000-fold with 1× assay diluent. 10,000-fold. Both standard curve dilutions (100 μL each) and diluted serum samples were added to each well of the ELISA plate pre-coated with capture antibody. The plate was incubated at room temperature for 30 minutes before washing. Enzyme-antibody conjugate (100 μL per well) was added for a 20-minute incubation. Unbound antibody conjugate was removed and the plate was washed again before the addition of the chromogenic substrate solution. The plate was incubated for 10 minutes before adding 100 μL of the stop solution, e.g., sulfuric acid (approximately 0.3 M). The plate was read on a Clariostar plate reader at an absorbance of 450 nm. Serum TTR levels were calculated by SoftMax Pro software ver. 6.4.2 or Mars software ver. 3.31 using a four-parameter logistic curve fit off the standard curve. Final serum values were adjusted for the assay dilution. Percent protein knockdown (% KD) values were determined relative to controls, which generally were animals sham-treated with vehicle (TSS) unless otherwise indicated. Percent TSS was calculated by division of each sample TTR value by the average value of the TSS group then adjusted to a percentage value.

### Example 11.1. In Vivo Editing Using Co-Formulated LNPs

[1033] The editing efficiency of the modified sgRNAs tested in Example D.2 were further evaluated in a mouse model. Guide RNA designs with identical guide sequences targeting mouse PCSK9 but with conserved regions differing lengths were tested LNPs were prepared as described in Example 1. The LNPs were prepared using ionizable lipid A, cholesterol, DSPC, and PEG2k-DMG in a 50:38:9:3 molar ratio, respectively. The LNPs were formulated with a lipid amine to RNA phosphate (N:P) molar ratio of about 6. A gRNA targeting the PCSK9 gene, as indicated in Table 26, and mRNA C were co-formulated at 1:2 gRNA to mRNA by weight in LNPs. LNPs were administered to female CD-1 mice (n=5) at a dose of 1 mg/kg of total RNA as described above. Mice were euthanized at 7 days post dosing. The editing efficiency for LNPs containing the indicated sgRNAs are shown in Table 26 and illustrated in FIG. 19.

TABLE 26
Mean percent editing in mouse liver.

| Guide | Dose (mg/kg) | Mean % Edit | SD |
|---|---|---|---|
| Vehicle | — | 0.0 | 0.0 |
| G017564 | 1 | 2.5 | 0.9 |
| G017565 | 1 | 2.2 | 1.0 |
| G017566 | 1 | 2.2 | 1.2 |

### Example 11.2. In Vivo Editing Using pgRNA and mRNA LNPs

[1034] The editing efficiency of modified pgRNAs were evaluated in vivo. Four nucleotides in each of the loops of the repeat/anti-repeat region, hairpin 1, and hairpin 2 were substituted with Spacer-18 PEG linkers, in addition to the guide modifications specified in the previous study in Example 11.1.

[1035] LNPs were generally prepared as described in Example 1 with a single RNA species as cargo. The LNPs contained lipid A, cholesterol, DSPC, and PEG2k-DMG in a 50:38:9:3 molar ratio, respectively. The LNPs were formulated with a lipid amine to RNA phosphate (N:P) molar ratio of about 6.

[1036] LNPs containing gRNAs targeting TTR gene indicated in Table 27 were administered to female CD-1 mice (n=5) at a dose of 0.1 mg/kg or 0.3 mg/kg of total RNA as described above. LNP containing mRNA (mRNA M; SEQ ID NO: 631) and LNP containing a pgRNA (G021846 or G021844) were delivered simultaneously at a ratio of 1:2 by RNA weight, respectively. Mice were euthanized at 7 days post dose.

[1037] The editing efficiency, serum TTR knockdown, and percent TSS for the LNPs containing the indicated pgRNAs are shown in Table 27 and illustrated in FIGS. 20A-20C respectively.

TABLE 27
Liver Editing, Serum TTR protein, and TTR protein knockdown

| | | | | Mean | | | |
|---|---|---|---|---|---|---|---|
| | | | | serum | | | |
| | Dose | Mean % | | TTR | | Mean % | |
| Guide | (mg/kg) | Edit | SD | (ug/ml) | SD | TSS | SD |
| TSS | NA | 0.1 | 0 | 733.1 | 131.2 | 100 | 17.9 |
| G021846 | 0.1 | 21.9 | 2.8 | 369.5 | 56.2 | 50.4 | 7.7 |
| | 0.3 | 33.8 | 2.9 | 269.8 | 21.3 | 36.8 | 2.6 |
| G021844 | 0.1 | 59.6 | 3.9 | 84.1 | 26.6 | 11.5 | 3.6 |
| | 0.3 | 71.6 | 1.8 | 24.4 | 9.2 | 3.3 | 1.2 |

[1038] A pgRNA (G021844) from the study described above was evaluated in mice with alternative mRNAs at varied dose levels. LNPs were generally prepared as described in Example 1 with a single RNA species as cargo. LNPs containing pgRNA (G21844) or mRNA (mRNA P or mRNA M) were formulated as described in Example 1. The LNPs used in were prepared with ionizable lipid A, cholesterol, DSPC, and PEG2k-DMG in a 50:38:9:3 molar ratio, respectively. The LNPs were formulated with a lipid amine to RNA phosphate (N:P) molar ratio of about 6. Both G000502 and G021844 target exon 3 of the mouse TTR gene. LNP containing pgRNA and LNP containing mRNA were dosed simultaneously based on combined RNA weight at a ratio of 2:1 guide:mRNA by RNA weight, respectively. An additional LNP was co-formulated with G000502 and SpyCas9 mRNA at a ratio of 1:2 by weight, respectively, a preferred SpyCas9 guide:mRNA ratio.

[1039] LNPs indicated in Table 28 were administered to female CD-1 mice (n=4) at a dose of 0.1 mg/kg or 0.03 mg/kg of total RNA. The editing efficiency for LNPs containing the indicated gRNAs are shown in Table 28 and illustrated in FIG. 20D-20E.

TABLE 28
Liver Editing and Serum TTR protein knockdown

| | | | | | Mean | |
|---|---|---|---|---|---|---|
| | | | | | serum | |
| | | Dose | Mean % | | TTR | |
| Guide | mRNA | (mg/kg) | Edit | SD | (ug/ml) | SD |
| TSS | TSS | NA | 0.12 | 0.04 | 937.4 | 100.5 |
| G000502 | SpyCas9 | 0.1 | 44.50 | 6.9 | 370.7 | 80.1 |
| G021844 | mRNA P | 0.03 | 37.70 | 2.9 | 398.7 | 41.9 |
| | SEQ ID | 0.1 | 65.40 | 2.2 | 92.8 | 27.5 |
| | NO: 634 | | | | | |
| | mRNA M | 0.03 | 32.02 | 2.1 | 527.4 | 93.6 |
| | SEQ ID | | | | | |
| | NO: 631 | 0.1 | 62.50 | 17.4 | 268.6 | 236.8 |

### Example 11.3. In Vivo Editing Using sgRNA and mRNA LNPs

[1040] LNPs were generally prepared as described in Example 1 with a single RNA species as cargo. The LNPs used in were prepared with Lipid A, cholesterol, DSPC, and PEG2k-DMG in a 50:38:9:3 molar ratio, respectively. The LNPs were formulated with a lipid amine to RNA phosphate (N:P) molar ratio of about 6. The sgRNAs were designed to target the pcsk9 gene (G020361) or the Rosa26 gene (G020848).

[1041] LNPs containing sgRNA or mRNA were administered to female CD-1 mice (n=5) at a dose of 1 mg/kg of total RNA. The mRNAs tested (mRNA C (SEQ ID NO:622), mRNA J (SEQ ID NO: 628), mRNA Q (SEQ ID NO: 635), mRNA N (SEQ ID NO: 632) were designed with varying numbers and arrangements of NLS. LNPs were dosed simultaneously based on the combined weight of RNA cargo at a 1:1 ratio of gRNA:mRNA by RNA weight. Mean percent editing is shown in Table 29 and illustrated in FIG. 21.

TABLE 29
Mean percent editing in mouse liver.

| Guide | mRNA | Dose (mg/kg) | Mean % indel | SD |
|---|---|---|---|---|
| TSS | TSS | NA | 0.1 | 0.0 |
| G020361 | mRNA C | 1 | 3.7 | 1.5 |
| | mRNA J | 1 | 2.1 | 0.8 |
| | mRNA Q | 1 | 4.5 | 1.8 |
| | mRNA N | 1 | 3.6 | 1.0 |
| G020848 | mRNA C | 1 | 0.8 | 0.3 |
| | mRNA J | 1 | 0.4 | 0.1 |
| | mRNA Q | 1 | 0.7 | 0.2 |
| | mRNA N | 1 | 0.9 | 0.5 |

### Example 12. In Vivo Editing with NmeCas9 and Either sgRNA or pgRNA

[1042] The editing efficiency of the modified pgRNAs tested with Nme2Cas9 was tested in a mouse model. All Nine sgRNAs tested comprised the same 24nt guide sequence targeting mTTR.

[1043] LNPs were generally prepared as described in Example 1 with a single RNA species as cargo. The LNPs used in were prepared with Lipid A, cholesterol, DSPC, and PEG2k-DMG in a 50:38:9:3 molar ratio, respectively. The LNPs were formulated with a lipid amine to RNA phosphate (N:P) molar ratio of about 6. The LNPs were mixed at a ratio of 2:1 by weight of gRNA to mRNA cargo. Dose is calculated based on the combined RNA weight of gRNA and mRNA. Transport and storage solution (TSS) used in LNP preparation was dosed in the experiment as a vehicle-only negative control.

[1044] CD-1 female mice, ranging 6-10 weeks of age were used in each study involving mice (n=5 per group, except TSS control n=4). Formulations were administered intravenously via tail vein injection according to the doses listed in Table 30. Animals were periodically observed for adverse effects for at least 24 hours post-dose. Six days after treatment, animals were euthanized by cardiac puncture under isoflurane anesthesia; liver tissue was collected for downstream analysis. Liver punches weighing between 5 and 15 mg were collected for isolation of genomic DNA and total RNA. Genomic DNA samples were analyzed with NGS sequencing as described in Example 1. The editing efficiency for LNPs containing the indicated mRNAs and gRNAs are shown in Table 30 and illustrated in FIG. 22.

TABLE 30
Mean percent editing in mouse liver

| | | Dose | Mean % | | |
|---|---|---|---|---|---|
| mRNA | gRNA | (mg/kg) | Edit | SD | N |
| TSS | TSS | — | 0.08 | 0.05 | 4 |
| mRNA P | G021536 | 0.03 | 21.68 | 6.87 | 5 |
| (2 × N term | (101-nt Nme sgRNA) | 0.1 | 63.22 | 3.28 | 5 |
| NLS, HiBiT) | | | | | |
| mRNA P | G021844 | 0.03 | 36.28 | 9.45 | 5 |
| (2 × N term | (93-nt Nme pgRNA) | 0.1 | 66.44 | 3.55 | 5 |
| NLS, HiBiT) | | | | | |
| mRNA O | G021844 | 0.03 | 40.88 | 14.16 | 5 |
| (2 × N-term | (93-nt Nme pgRNA) | 0.1 | 66.02 | 5.01 | 5 |
| NLS) | | | | | |

### Example 13. In Vivo Base Editing with Nme2Cas9 gRNA

[1045] The editing efficiency of the modified gRNAs with different mRNAs were tested with Nine base editor construct in the mouse model. This experiment was performed in parallel to Example 12 and used the same control samples. LNPs were generally prepared as described in Example 1 with a single RNA species as cargo. The LNPs used were prepared with Lipid A, cholesterol, DSPC, and PEG2k-DMG in a 50:38:9:3 molar ratio, respectively. The LNPs were formulated with a lipid amine to RNA phosphate (N:P) molar ratio of about 6. The LNPs used were formulated as described in Example 1, except that each component, guide RNA, or mRNA was formulated individually into an LNP, and the LNP were mixed prior to administration as described in Table 31. For Nme2Cas9 and Nme2Cas9 base editor samples, LNPs were mixed at a ratio of 2:1 by weight of gRNA to editor mRNA cargo. For SpyCas9 base editor samples, LNPs were mixed at a ratio of 1:2 by weight of gRNA to editor mRNA cargo. Dose, as indicated in Table 31 and FIG. 14, is calculated based on the combined RNA weight of gRNA and editor mRNA. Base editor samples were treated with an additional 0.03 mpk of UGI mRNA. Transport and storage solution (TSS) used in LNP preparation was dosed in the experiment as a vehicle-only negative control.

[1046] CD-1 female mice, ranging 6-10 weeks of age were used in each study involving mice (n=5 per group, except TSS control n=4). Formulations were administered intravenously via tail vein injection according to the doses listed in Table 31. Animals were periodically observed for adverse effects for at least 24 hours post-dose. Six days after treatment, animals were euthanized by cardiac puncture under isoflurane anesthesia; liver tissue were collected for downstream analysis. Liver punches weighing between 5 and 15 mg were collected for isolation of genomic DNA and total RNA. Genomic DNA was extracted using a DNA isolation kit (ZymoResearch, D3010) and samples were analyzed with NGS sequencing as described in Example 1. The editing efficiency for LNPs containing the indicated gRNAs are shown in Table 31 and illustrated in FIG. 23.

TABLE 31
Mean percent editing in mouse liver.

| | Dose | C-to-T % | | | C-to-A/G % | | | Indel % | | |
|---|---|---|---|---|---|---|---|---|---|---|
| Sample | (mg/kg) | Mean | SD | n | Mean | SD | n | Mean | SD | n |
| TSS | 0 | 0.00 | 0.00 | 4 | 0.10 | 0.00 | 4 | 0.08 | 0.05 | 4 |
| mRNA O + G021844 | 0.03 | 0.00 | 0.00 | 5 | 0.08 | 0.04 | 5 | 40.88 | 14.16 | 5 |
| (Nme2Cas9 + pgRNA) | 0.1 | 0.00 | 0.00 | 5 | 0.02 | 0.04 | 5 | 66.02 | 5.01 | 5 |
| mRNA S + mRNA G + | 0.03 | 25.60 | 5.28 | 5 | 3.50 | 0.76 | 5 | 11.14 | 2.18 | 5 |
| G021844 (Nme2 base | 0.1 | 46.34 | 1.53 | 5 | 5.74 | 0.33 | 5 | 13.52 | 0.90 | 5 |
| editor + UGI + pgRNA) | | | | | | | | | | |
| mRNA E + mRNA G + | 0.03 | 9.28 | 2.82 | 5 | 0.94 | 0.54 | 5 | 7.34 | 1.61 | 5 |
| G000502 (SpyBC22n + | 0.1 | 30.72 | 8.51 | 5 | 2.86 | 0.23 | 5 | 15.60 | 2.58 | 5 |
| UGI + sgRNA) | | | | | | | | | | |

### Example 14. Dose Response Curve for NmeCas9 gRNA in PMH with Nme2Cas9

[1047] The editing efficiency of the modified gRNAs was tested with Nme2Cas9 construct in primary mouse hepatocytes (PMH). All Nine sgRNAs tested comprised the same 24nt guide sequence targeting the mouse TTR gene (mTTR).

[1048] PMH (Gibco, Lot MC931) were thawed and resuspended in hepatocyte thawing medium with plating supplements (William's E Medium (Gibco, Cat. A12176-01)) with dexamethasone+cocktail supplement (Gibco, Cat. A15563, Lot 2019842) and Plating Supplements with FBS content (Gibco, Cat. A13450, Lot 1970698) followed by centrifugation. The supernatant was discarded, and the pelleted cells resuspended in hepatocyte plating medium plus supplement pack (Invitrogen, Cat. A1217601 and Gibco, Cat. CM3000). Cells were counted and plated on Bio-coat collagen I coated 96-well plates (Thermo Fisher, Cat. 877272) at a concentration of 15,000 cells/well. Plated cells were allowed to settle and adhere for 4-6 hours in a tissue culture incubator at 37° C. and 5% CO2 atmosphere. After incubation cells were checked for monolayer formation and were washed once with hepatocyte maintenance medium (Invitrogen, Cat. A1217601 and Gibco, Cat. CM4000).

[1049] LNPs were generally prepared as described in Example 1 with a cargo of 1:2 by weight of gRNA to mRNA O. The LNPs used were prepared with a molar ratio of 50% Lipid A, 38% cholesterol, 9% DSPC, and 3% PEG2k-DMG. The LNPs were formulated with a lipid amine to RNA phosphate (N:P) molar ratio of 6. Each LNP was applied to cells using an 8 point 4-fold serial dilution starting at 300 ng of total RNA per 100 μl well (about 32.25 nM gRNA concentration per well) as shown in Table 32. Upon treatment with LNPs, cells were incubated for 24 hours at 37° C. in Williams' E Medium (Gibco, A1217601) with maintenance supplements and 3% fetal bovine serum. Samples were run in triplicate. After 72 hours, cells were harvested and analyzed by NGS as described in Example 1.

[1050] The editing efficiency for LNPs containing the indicated gRNAs, and the corresponding EC50 for each, are shown in Table 32 and illustrated in FIG. 26.

TABLE 32
Mean percent indels at the TTR locus in primary mouse hepatocytes.

| | % | ng RNA | | | | | | | | EC50 |
|---|---|---|---|---|---|---|---|---|---|---|
| Guide | indels | 300 | 75 | 18.75 | 4.68 | 1.17 | 0.29 | 0.07 | 0 | (ng RNA) |
| G021536 | Mean | 97.7 | 96.4 | 90.9 | 43.1 | 13.9 | 1.3 | 0.3 | 0.0 | 5.23 |
| | SD | 0.5 | 0.3 | 5.0 | 10.1 | 6.5 | 0.7 | 0.1 | 0.0 | |
| G021844 | Mean | 96.7 | 96.9 | 93.8 | 60.6 | 27.2 | 4.0 | 0.5 | 0.3 | 2.86 |
| | SD | 0.8 | 0.3 | 1.9 | 7.5 | 13.4 | 2.7 | 0.3 | 0.1 | |
| G027492 | Mean | 97.1 | 96.5 | 95.2 | 64.3 | 30.2 | 6.2 | 0.5 | 0.0 | 2.49 |
| | SD | 1.4 | 0.4 | 1.6 | 13.4 | 15.9 | 3.5 | 0.4 | 0.1 | |
| G027493 | Mean | 96.5 | 94.9 | 82.7 | 32.4 | 8.6 | 0.9 | 0.0 | 0.0 | 6.95 |
| | SD | 0.1 | 0.6 | 6.4 | 6.2 | 5.5 | 0.8 | 0.1 | 0.0 | |
| G027494 | Mean | 96.0 | 91.7 | 78.3 | 19.6 | 6.7 | 0.7 | 0.0 | 0.0 | 9.06 |
| | SD | 1.0 | 2.2 | 8.9 | 7.6 | 4.0 | 0.4 | 0.1 | 0.0 | |
| G027495 | Mean | 96.0 | 94.6 | 83.8 | 22.0 | 11.6 | 1.8 | 0.2 | 0.1 | 8.31 |
| | SD | 0.5 | 1.8 | 6.8 | 9.5 | 7.3 | 1.8 | 0.1 | 0.1 | |
| G027496 | Mean | 96.2 | 93.2 | 77.8 | 13.2 | 5.4 | 0.4 | 0.1 | 0.0 | 10.22 |
| | SD | 0.7 | 2.9 | 8.4 | 3.4 | 2.7 | 0.4 | 0.1 | 0.0 | |

### Example 15. In Vivo Editing with NmeCas9 gRNA

[1051] The editing efficiency of the modified gRNAs was tested with Nme2Cas9 construct in mice. All Nine sgRNAs tested comprised the same 24 nt guide sequence targeting the mouse TTR gene (mTTR).

[1052] LNPs were generally prepared as described in Example 1 with a cargo of 1:2 by weight of gRNA to mRNA O. The LNPs used were prepared with a molar ratio of 50% Lipid A, 38% cholesterol, 9% DSPC, and 3% PEG2k-DMG. The LNPs were formulated with a lipid amine to RNA phosphate (N:P) molar ratio of about 6. Dose was calculated based on the combined RNA weight of gRNA and mRNA. Transport and storage solution (TSS) used in LNP preparation was dosed in the experiment as a vehicle-only negative control.

[1053] CD-1 female mice, about 6-8 weeks old, were used in each study involving mice (n=5 for all groups). Animals were fed regular chow with standard upkeep. Animals were weighed before dose administration. TSS and LNP formulations were administered intravenously via tail vein injection with a dosage of 0.03 mpk. Animals were periodically observed for adverse effects for at least 24 hours post-dose. Seven days after treatment, animals were euthanized by cardiac exsanguination under isoflurane anesthesia; blood for serum preparation and liver tissue were collected for downstream analysis.

[1054] Serum TTR levels shown in Table 33 and FIG. 27 were produced using Serum TTR ELISA—Prealbumin ELISA (Aviva Systems; cat #OKIA00111) according to the manufacturer's protocol. The level of serum TTR is significantly lower in all experimental groups compared to the negative control (TSS).

TABLE 33
Serum TTR levels (ug/ml).

| | Serum TTR | | |
|---|---|---|---|
| Guide ID | (ug/ml) | SD | % TSS |
| TSS | 704.9 | 98.3 | 100% |
| G021844 | 150.0 | 84.9 | 21% |
| G021536 | 371.1 | 95.6 | 53% |
| G027492 | 239.4 | 30.5 | 34% |
| G027493 | 423.4 | 170.0 | 60% |
| G027494 | 496.3 | 89.8 | 70% |
| G027495 | 263.6 | 68.9 | 37% |
| G027496 | 362.4 | 52.7 | 51% |

[1055] Liver biopsy punches weighing between 5 and 15 mg were collected for isolation of genomic DNA. Genomic DNA was extracted using a DNA isolation kit (ZymoResearch, D3012) and samples were analyzed with NGS sequencing (n=5 for all groups) as described in Example 1. The editing efficiency for LNPs containing the indicated gRNAs are shown in Table 34 and illustrated in FIG. 28.

TABLE 34
Mean percent indels at the TTR locus in mouse liver samples

| Guide | Mean | SD |
|---|---|---|
| TSS | 0.12 | 0.22 |
| G021844 | 57.1 | 5.7 |
| G021536 | 31.5 | 4.9 |
| G027492 | 51.3 | 10.4 |
| G027493 | 27.0 | 14.0 |
| G027494 | 17.6 | 8.6 |
| G027495 | 43.2 | 7.2 |
| G027496 | 23.5 | 8.6 |

### Example 16. In Vivo Editing with NmeCas9 gRNA

[1056] The editing efficiency of the modified gRNAs was tested with Nme2Cas9 mRNA in mice. All Nine sgRNAs tested comprised the same 24nt guide sequence targeting mTTR.

[1057] LNPs were generally prepared as described in Example 1 with a cargo of 1:2 by weight of gRNA to mRNA O. The LNPs used were prepared with a molar ratio of 50% Lipid A, 38% cholesterol, 9% DSPC, and 3% PEG2k-DMG. The LNPs were formulated with a lipid amine to RNA phosphate (N:P) molar ratio of about 6. Dose was calculated based on the combined RNA weight of gRNA and mRNA. Transport and storage solution (TSS) used in LNP preparation was dosed in the experiment as a vehicle-only negative control.

[1058] CD-1 female mice, about 6 weeks old, were used in each study involving mice (n=5 for all groups). Animals were weighed before dose administration for dose calculation, and 24 hours post-administration for monitoring. TSS and LNP formulations were administered intravenously via tail vein injection with a dosage of 0.01 mpk or 0.03 mpk. Animals were periodically observed for adverse effects for at least 24 hours post-dose. Seven days after treatment, animals were euthanized by cardiac exsanguination under isoflurane anesthesia. Blood was collected by cardiac puncture for Serum TTR ELISA, and liver tissue was collected for downstream analysis.

[1059] Serum TTR results prepared using Serum TTR ELISA—Prealbumin ELISA (Aviva Systems; cat #OKIA00111) according to the manufacturer's protocol are shown in FIG. 29 and Table 35.

TABLE 35
Serum TTR measurements following treatment.

| | Dosage | Serum TTR | | |
|---|---|---|---|---|
| Guide ID | (mpk) | (ug/ml) | SD | N |
| Vehicle | | 663.5 | 61.5 | 5 |
| G021844 | 0.01 | 585.5 | 166.1 | 5 |
| | 0.03 | 205.8 | 99.2 | 5 |
| G021536 | 0.01 | 749.2 | 425.3 | 5 |
| | 0.03 | 252.6 | 50.2 | 4 |
| G027492 | 0.01 | 527.4 | 163.1 | 4 |
| | 0.03 | 266.0 | 92.4 | 5 |
| G027495 | 0.01 | 626.9 | 157.7 | 5 |
| | 0.03 | 310.0 | 118.1 | 5 |

[1060] Liver biopsy punches weighing about 5 mg-15 mg were collected for isolation of genomic DNA and total RNA. Genomic DNA was extracted using a DNA isolation kit (ZymoResearch, D3012) and samples were analyzed with NGS sequencing (n=5 for all groups) as described in Example 1. The editing efficiency for LNPs containing the indicated gRNAs are shown in Table 36 and illustrated in FIG. 30.

TABLE 36
Mean percent indels at the TTR locus in mouse liver samples.

| Guide ID | Dosage | Mean | SD | N |
|---|---|---|---|---|
| Vehicle | 0.00 | 0.1 | 0.07 | 5 |
| G021844 | 0.01 | 19.7 | 2.9 | 5 |
| | 0.03 | 49.6 | 7.9 | 5 |
| G021536 | 0.01 | 10.7 | 4.7 | 5 |
| | 0.03 | 34.4 | 4.1 | 4 |
| G027492 | 0.01 | 21.1 | 9.2 | 4 |
| | 0.03 | 44.6 | 9.4 | 5 |
| G027495 | 0.01 | 9.3 | 2.6 | 4 |
| | 0.03 | 30.2 | 10.9 | 5 |

### Example 17. Guide Screen with Nme1Cas9 and Nme3Cas9 mRNAs in T Cells

[1061] The editing efficiency of one modified gRNA scaffold was tested in T cells with Nme1Cas9 or Nme3Cas9 mRNA using guides with 9 distinct target sequences in the TRAC locus.

[1062] Healthy human donor apheresis was obtained commercially (Hemacare, Donor 3786), and cells were washed and resuspended in CliniMACS® PBS/EDTA buffer (Miltenyi Biotec Cat. 130-070-525) and processed in a MultiMACS™ Cell 24 Separator Plus device (Miltenyi Biotec). T cells were isolated via positive selection using a Straight from Leukopak® CD4/CD8 MicroBead kit, human (Miltenyi Biotec Cat. 130-122-352). T cells were aliquoted and cryopreserved for use in Cryostor® CS10 (StemCell Technologies Cat. 07930). Upon thawing, T cells were plated at a density of 1.0×10\hat{ }⁶ cells/mL in T cell growth media (TCGM) composed of CTS OpTmizer T Cell Expansion SFM and T Cell Expansion Supplement (Thermo Fisher Cat. A1048501), 5% human AB serum (GeminiBio, Cat. 100-512), 1× Penicillin-Streptomycin, 1× Glutamax, 10 mM HEPES, 200 U/mL recombinant human interleukin-2 (Peprotech, Cat. 200-02), 5 ng/mL recombinant human interleukin-7 (Peprotech, Cat. 200-07), and 5 ng/mL recombinant human interleukin-15 (Peprotech, Cat. 200-15). T cells were rested in this media for 24 hours, at which time they were activated with T Cell TransAct™, human reagent (Miltenyi, Cat. 130-111-160) added at a 1:100 ratio by volume.

[1063] For Nme1Cas9 guide screening, solutions containing mRNA encoding Nme1Cas9 (mRNA AB) were prepared in P3 buffer. Guide RNAs targeting various sites in the TRAC locus were denatured for 2 minutes at 95° C. and incubated at room temperature for 5 minutes. Forty-eight hours post activation, T cells were harvested, centrifuged, and resuspended at a concentration of 12.5×10\hat{ }⁶ cells/mL in P3 electroporation buffer (Lonza). For each well to be electroporated, 1×10\hat{ }⁵ cells were mixed with 600 ng of Nme1Cas9 mRNA and 5 μM of gRNAs in a final volume of 20 μL of P3 electroporation buffer. This mix was transferred in duplicate to 96-well Nucleofector™ plates and electroporated using the manufacturer's pulse code. Electroporated T cells were immediately rested in CTS OpTmizer T cell growth media without cytokines for 15 minutes before being transferred to new flat-bottom 96-well plates containing an additional CTS OpTmizer T cell growth media supplemented with cytokines. The resulting plates were incubated at 37° C. for 3 days. On day 3 post-electroporation, cells were split 1:2 in 2 U-bottom plates.

[1064] On day 7 post-electroporation, the plated T cells were assayed by flow cytometry to determine surface expression of the T cell receptor. Briefly, T cells were incubated with antibodies against CD3 (BioLegend, Cat. No. 317336), CD4 (BioLegend, Cat. No. 317434), CD8 (BioLegend, Cat. No. 301046), and Viakrome (Beckman Coulter, Cat. No. C36628). Cells were subsequently washed, resuspended in cell staining buffer and processed on a Cytoflex flow cytometer (Beckman Coulter). Flow cytometry data was analyzed using the FlowJo software package. T cells were gated based on size, shape, viability, and the expression of CD8 and CD3. Samples were run in duplicate.

[1065] The CD3 is a cell-surface component of the T cell receptor complex and its presence at the cell surface is used as a surrogate marker for TRAC protein expression. CD3 negative cell population, and corresponding standard deviation (SD) for each of the indicated gRNAs are shown in Table 37 and illustrated in FIG. 31.

TABLE 37
Mean percent CD3 negative T cells following
TRAC editing with Nme1Cas9

| Guide ID | Mean | SD |
|---|---|---|
| G024103 | 0.95 | 0.02 |
| G024104 | 1.52 | 0.04 |
| G024108 | 52.82 | 0.40 |
| G024109 | 1.69 | 0.14 |
| G024110 | 2.24 | 0.39 |
| G024111 | 2.10 | 0.06 |
| G024112 | 1.81 | 0.14 |
| G024113 | 1.19 | 0.26 |
| G024114 | 0.97 | 0.05 |

[1066] For screening of guides with Nme3Cas9 mRNA, T cells were prepared as described in this example. Solutions containing mRNA encoding Nme3Cas9 (mRNA Z) were prepared in P3 buffer, as well as controls of Nme1Cas9 (mRNA AB) and Nme2Cas9 (mRNA O). Electroporation of an NmeCas9 (e.g., Nme1Cas9, Nme2Cas9, or Nme3Cas9) gRNA and mRNA was performed as described above. Samples were electroporated in triplicate. On day 3 post electroporation, cells were assayed via flow cytometry as described above.

[1067] The CD3-negative cell population and corresponding standard deviation (SD) for each of the indicated gRNAs are shown in Table 38 and illustrated in FIG. 32.

TABLE 38
Mean percent CD3 negative T cells following
TRAC editing with Nme3Cas9.

| Guide ID | Mean | SD |
|---|---|---|
| G028844 | 2.99 | 0.49 |
| G028845 | 2.97 | 0.30 |
| G028846 | 22.83 | 1.65 |
| G028847 | 8.71 | 1.16 |
| G028848 | 95.6 | 0.74 |
| G028849 | 6.24 | 0.02 |
| G028850 | 69.63 | 3.57 |
| G028851 | 1.49 | 0.53 |
| G028852 | 79.13 | 3.34 |
| G028853 (Nme1 Control) | 97.43 | 0.20 |
| G021469 (Nme2 Control) | 92.46 | 2.00 |

### Example 18. Expression of Codon Optimized NmeCas9 mRNAs

[1068] To quantify expression of each mRNA construct, protein expression levels were measured following electroporation of mRNAs encoding Nme1Cas9, Nme2Cas9, or Nme3Cas9 into T cells. All of the NmeCas9 mRNA constructs have the same general structure with sequential SV40 and nucleoplasmin nuclear localization signal coding sequences N-terminal to the NmeCas9 open reading frame. Constructs include a coding sequence for a HiBiT tag C-terminal to the NmeCas9 open reading frame. The components are joined by linkers and the specific sequences are provided herein.

[1069] Healthy human donor apheresis was obtained commercially (Hemacare, Donor 3786), and cells were washed and resuspended in CliniMACS® PBS/EDTA buffer (Miltenyi Biotec Cat. 130-070-525) and processed in a MultiMACS™ Cell 24 Separator Plus device (Miltenyi Biotec). T cells were isolated via positive selection using a Straight from Leukopak® CD4/CD8 MicroBead kit, human (Miltenyi Biotec Cat. 130-122-352). T cells were aliquoted and cryopreserved for future use in Cryostor® CS10 (StemCell Technologies Cat. 07930). Upon thawing, T cells were plated at a density of 1.0×10\hat{ }⁶ cells/mL in T cell growth media (TCGM) composed of CTS OpTmizer T Cell Expansion SFM and T Cell Expansion Supplement (Thermo Fisher Cat. A1048501), 5% human AB serum (GeminiBio, Cat. 100-512), 1× Penicillin-Streptomycin, 1× Glutamax, 10 mM HEPES, 200 U/mL recombinant human interleukin-2 (Peprotech, Cat. 200-02), 5 ng/mL recombinant human interleukin-7 (Peprotech, Cat. 200-07), and 5 ng/mL recombinant human interleukin-15 (Peprotech, Cat. 200-15). T cells were rested in this media for 24 hours, at which time they were activated with T Cell TransAct™, human reagent (Miltenyi, Cat. 130-111-160) added at a 1:100 ratio by volume.

[1070] Solutions containing mRNA encoding NmeCas9 were prepared in P3 buffer. Guide RNAs targeting the TRAC locus were removed from the storage and denatured for 2 minutes at 95° C. and incubated at room temperature for 5 minutes. Forty-eight hours post activation, T cells were harvested, centrifuged, and resuspended at a concentration of 12.5×10\hat{ }⁶ cells/mL in P3 electroporation buffer (Lonza). Each well to be electroporated contained 1×10\hat{ }⁵ cells, NmeCas9 mRNA as specified in Table 39, and 1 μM gRNAs (G028853 for Nme1Cas9; G021469 for Nme2Cas9; G028848 for Nme3Cas9) as specified in Table 39 in a final volume of 20 μL of P3 electroporation buffer. NmeCas9 mRNA was tested using a three-fold, five point serial dilution starting at 600 ng mRNA. The appropriate gRNA & mRNA mix was transferred in triplicate to 96-well Nucleofector™ plates and electroporated using the manufacturer's pulse code. Electroporated T cells were immediately rested in CTS OpTmizer T cell growth media without cytokines for 15 minutes before being transferred to new flat-bottom 96-well plates containing an additional CTS OpTmizer T cell growth media supplemented with cytokines. The resulting plates were incubated at 37° C. for 24 hours prior to HiBiT luminescence assay or 96 hours prior to flow cytometry.

[1071] T cells were harvested for protein expression analysis at 24 h post-electroporation. T cells were lysed by Nano-Glo® HiBiT Lytic Assay (Promega). Luminescence was measured using the Biotek Neo2 plate reader. Table 39 and FIG. 33 show the Cas9 protein expression and corresponding standard deviation (SD) in activated cells as relative luminescence units (RLU).

TABLE 39
Mean luminescence (RLU) as a relative measure of
Cas9 protein expression in T cells at 24 hours.

| | mRNA | | | | | |
|---|---|---|---|---|---|---|
| | (ng) | 600 | 200 | 66.6 | 22.2 | 7.4 |
| mRNA X | Mean | 6955.7 | 2941.0 | 1893.7 | 758.3 | 288.7 |
| (Nme1Cas9) | (RLUs) | | | | | |
| G028853 | SD | 800.5 | 232.0 | 268.3 | 256.0 | 21.4 |
| mRNA Y | Mean | 10999.7 | 4967.6 | 2888.7 | 1423.0 | 479.3 |
| (Nme1Cas9) | (RLUs) | | | | | |
| G028853 | SD | 1621.8 | 444.6 | 451.5 | 213.3 | 42.0 |
| mRNA V | Mean | 43026.7 | 15244.0 | 6522.3 | 2658.3 | 1067.3 |
| (Nme2Cas9) | (RLUs) | | | | | |
| G021469 | SD | 7729.3 | 1288.1 | 229.0 | 174.3 | 127.1 |
| mRNA Z | Mean | 19217.3 | 6488.0 | 2386.0 | 1033.3 | 414.7 |
| (Nme3Cas9) | (RLUs) | | | | | |
| G028848 | SD | 1311.8 | 521.0 | 394.3 | 93.6 | 50.2 |

[1072] On day 4 post-editing, T cells were assayed by flow cytometry to determine surface protein expression. Briefly, T cells were incubated for 30 minutes at 4° C. with a mixture of antibodies diluted in cell staining buffer (BioLegend, Cat. No. 420201). Antibodies against CD3 (BioLegend, Cat. No. 317336), CD4 (BioLegend, Cat. No. 317434), CD8 (BioLegend, Cat. No. 301046), and Viakrome (Beckman Coulter, Cat. No. C36628) were diluted at 1:100. Cells were subsequently washed, resuspended in 100 μL of cell staining buffer and processed on a Cytoflex flow cytometer (Beckman Coulter). Flow cytometry data were analyzed using the FlowJo software package. T cells were gated based on size, shape, viability, CD8, and CD3. Samples were run in triplicate. The CD3-negative cell population and corresponding standard deviation (SD) for each of the indicated gRNAs are shown in Table 40 and illustrated in FIG. 34.

TABLE 40
Percent CD3-negative cells of T cells following TRAC editing.

| | mRNA | | | | | |
|---|---|---|---|---|---|---|
| | (ng) | 600 | 200 | 66.7 | 22.2 | 7.4 |
| mRNA X | Mean | 95.2 | 94.6 | 90.3 | 79.9 | 58.7 |
| (Nme1Cas9) | SD | 0.8 | 1.1 | 0.6 | 3.1 | 4.8 |
| G028853 | | | | | | |
| mRNA Y | Mean | 97.2 | 96.2 | 93.7 | 88.7 | 75.0 |
| (Nme1Cas9) | SD | 0.8 | 1.1 | 0.9 | 1.4 | 1.3 |
| G028853 | | | | | | |
| mRNA V | Mean | 87.7 | 84.6 | 80.3 | 66.6 | 42.7 |
| (Nme2Cas9) | SD | 3.3 | 3.9 | 2.4 | 1.6 | 0.1 |
| G021469 | | | | | | |
| mRNA Z | Mean | 96.6 | 93.4 | 85.5 | 73.6 | 36.0 |
| (Nme3Cas9) | SD | 0.1 | 1.1 | 2.3 | 5.8 | 2.0 |
| G028848 | | | | | | |

### Example 19. In Vitro Editing with Selected Guides in Primary Cynomolgus Monkey Hepatocytes (PCH)

[1073] Three NmeCas9 sgRNAs (G024739, G024741, and G024743) were selected for evaluation in a dose response assay. The tested NmeCas9 sgRNAs targeting the cynomolgus TTR gene include a 24-nucleotide guide sequence.

[1074] Unmodified and modified versions of the guides are provided in Table 41.

TABLE 41
Unmodified and modified
versions of select gRNAs.

| Guide ID | Unmodified sequence | Modified sequence |
|---|---|---|
| G024739 | AGGACCAGCCUCAGACACA | mA*mG*mG*mAmCCAmGmCCm |
| | AAUACGUUGUAGCUCCCUG | UCmAGACAmCAAAmUACmGUU |
| | AAACCGUUGCUACAAUAAG | GmUmAmGmCUCCCmUmGmAmA |
| | GCCGUCGAAAGAUGUGCCG | mAmCmCGUUmGmCUAmCAAU* |
| | CAACGCUCUGCCUUCUGGC | AAGmGmCCmGmUmCmGmAmAm |
| | AUCGUU | AmGmAmUGUGCmCGmCAAmCG |
| | (SEQ ID NO: 947) | CUCUmGmCCmUmUmCmUGGCA |
| | | UCG*mU*mU |
| | | (SEQ ID NO: 928) |
| G024741 | CUGCCUCGGACGGCAUCUA | mC*mU*mG*mCmCUCmGmGAm |
| | GAACUGUUGUAGCUCCCUG | CGmGCAUCmUAGAmACUmGUU |
| | AAACCGUUGCUACAAUAAG | GmUmAmGmCUCCCmUmGmAmA |
| | GCCGUCGAAAGAUGUGCCG | mAmCmCGUUmGmCUAmCAAU* |
| | CAACGCUCUGCCUUCUGGC | AAGmGmCCmGmUmCmGmAmAm |
| | AUCGUU | AmGmAmUGUGCmCGmCAAmCG |
| | (SEQ ID NO: 948) | CUCUmGmCCmUmUmCmUGGCA |
| | | UCGumU*mU |
| | | (SEQ ID NO: 929) |

[1075] gRNAs and Cas9 mRNA were lipofected, as described below, into primary cynomolgus hepatocytes (PCH). PCH (In Vitro ADMET Laboratories 10136011) were prepared as described in Example 1. PCH were plated at a density of 40,000 cells/well. LNP formulations were prepared as described in Example 1. LNPs were prepared with the lipid composition at a molar ratio of 50% lipid A, 38% cholesterol, 9% DSPC, and 3% PEG2k-DMG. The LNPs were formulated with a lipid amine to RNA phosphate (N:P) molar ratio of about 6 and a gRNA as indicated in Table 41. PCH in 100 uL media were treated with an 8-point, 4-fold dilution series of LNP containing sgRNA, starting at 70 ng, and a fixed 30 ng dose of LNP encapsulating mRNA O by mRNA weight. The sgRNA concentration in each well is indicated in Table 42. The cells were lysed 72 hours post-treatment and NGS analysis was performed as described in Example 1. Dose response of editing efficiency to guide concentration was measured in triplicate samples. Table 42 and FIG. 35 shows mean percent editing and standard deviation (SD) at each guide concentration.

TABLE 42
Mean percent indels at TTR following editing in PCH.

| | | | |
|---|---|---|---|
| Guide LNP | G024739 | G024741 | G024743 |

| (ng/uL) | Mean | SD | Mean | SD | Mean | SD |
|---|---|---|---|---|---|---|
| 0.7 | 79.0 | 1.7 | 63.5 | 3.7 | 42.6 | 1.1 |
| 0.2 | 56.8 | 2.4 | 17.4 | 1.2 | 25.4 | 2.3 |
| 0.04 | 27.2 | 3.6 | 2.3 | 0.5 | 9.8 | 0.5 |
| 0.01 | 9.5 | 1.8 | 0.6 | 0.1 | 3.6 | 0.5 |
| 0.003 | 3.5 | 0.9 | 0.3 | 0.1 | 0.7 | 0.3 |
| 0.0007 | 0.9 | 0.3 | 0.1 | 1.3 | 0.3 | 0.1 |
| 0.0002 | 0.4 | 0.1 | 0.1 | 0.0 | 0.0 | 0.0 |
| 0.00004 | 0.2 | 0.0 | 0.1 | 1.3 | 0.0 | 0.0 |

### Example 20. In Vitro Editing of LNPs Using mRNA Dilution Series in PCH

[1076] Modified sgRNAs having the same targeting site in the cynomolgus TTR gene were assayed to evaluate the editing efficiency in PCH of different mRNAs (mRNA O, mRNA AA) and formulation ratios. PCH (In Vitro ADMET Laboratories, 10136011) were prepared, treated, and analyzed as described in this example as in Example 1 unless otherwise noted. PCH were used and plated at a density of 50,000 cells/well. LNP formulations were prepared as described in Example 1. LNPs were prepared with a lipid composition having a molar ratio of 50% lipid A, 38% o cholesterol, 9% o DSPC, and 3% o PEG2k-DMG. The LNPs were formulated with a lipid amine to RNA phosphate (N:P) molar ratio of about 6 and a gRNA as indicated in Table 43. PCH in 100 uL media were treated with an 8-point, 3-fold serial dilution of mixed (separately formulated) or co-formulated LNP with various ratios of gRNA:mRNA. The top dose was 3 ng/uL total RNA by weight and gRNA:mRNA ratios for the dilution series were as indicated in Table 43. Samples were run in triplicate. Mean percent editing, standard deviation (SD), and a calculated EC50 are shown in Table 43 and in FIG. 36.

TABLE 43
Mean percent indels at the TTR locus following editing in PCH.

| | | LNP (ng/uL) | | | | | | | | EC50 |
|---|---|---|---|---|---|---|---|---|---|---|
| | | 3 | 1 | 0.33 | 0.11 | 0.04 | 0.01 | 0.004 | 0.001 | (ng/uL) |
| G024739:mRNA O | Mean % | 64 | 64.3 | 45.7 | 25.6 | 6.5 | 1.6 | 0.2 | 0.1 | 0.17 |
| LNPs Mixed 2:1 | editing | | | | | | | | | |
| | SD | 6.9 | 12.8 | 5.1 | 8.5 | 2.0 | 0.9 | 0.0 | 1.3 | |
| G024739:mRNA AA | Mean % | 58.2 | 69.2 | 46.5 | 29.3 | 7.4 | 0.6 | 0.1 | 0.0 | 0.13 |
| LNPs Mixed 2:1 | editing | | | | | | | | | |
| | SD | 4.5 | 12.2 | 13.8 | 7.6 | 3.3 | 0.3 | 0.0 | 0.0 | |
| G024739:mRNA AA | Mean % | 56.5 | 67.1 | 53.4 | 25.4 | 5.8 | 0.7 | 0.1 | 0.0 | 0.13 |
| LNPs Mixed 1:2 | editing | | | | | | | | | |
| | SD | 4.7 | 10.9 | 16.0 | 11.7 | 2.4 | 0.5 | 0.0 | 0.0 | |
| G024739:mRNA O | Mean % | 61.3 | 59.2 | 47.0 | 27.2 | 7.2 | 0.4 | 0.1 | 0.1 | 0.14 |
| Coformulated 2:1 | editing | | | | | | | | | |
| | SD | 4.4 | 9.3 | 13.2 | 8.4 | 2.2 | 0.2 | 0.0 | 0.0 | |
| G024739:mRNA AA | Mean % | 58.2 | 69.6 | 56.4 | 35.3 | 7.2 | 1.2 | 0.2 | 0.1 | 0.10 |
| Coformulated 2:1 | editing | | | | | | | | | |
| | SD | 3.0 | 14.4 | 11.4 | 11.4 | 3.3 | 0.4 | 0.1 | 1.3 | |
| G024739:mRNA AA | Mean % | 47.0 | 62.8 | 56.1 | 38 | 12.3 | 1.3 | 0.1 | 0.1 | 0.07 |
| Coformulated 1:2 | editing | | | | | | | | | |
| | SD | 5.8 | 10.5 | 15.3 | 13.9 | 4.3 | 0.1 | 0.0 | 1.3 | |

### Example 21. In Vivo Editing with NmeCas9 gRNA

[1077] The editing efficiency of the modified gRNAs was tested with Nme2Cas9 construct in mice. All Nine sgRNAs tested comprised the same 24 nt guide sequence targeting the mouse TTR gene (mTTR).

[1078] LNPs were generally prepared as described in Example 1 with a cargo of 1:2 by weight of gRNA to mRNA O. The LNPs used were prepared with a molar ratio of 50% Lipid A, 38% cholesterol, 9% DSPC, and 3% PEG2k-DMG. The LNPs were formulated with a lipid amine to RNA phosphate (N:P) molar ratio of about 6. Dose was calculated based on the combined RNA weight of gRNA and mRNA. Transport and storage solution (TSS) used in LNP preparation was dosed in the experiment as a vehicle-only negative control.

[1079] CD-1 female mice, about 6-8 weeks old, were used in each study involving mice. Animals were fed regular chow with standard upkeep. Animals were weighed before dose administration. TSS and LNP formulations were administered intravenously via tail vein injection with a dosage of 0.03 mpk. Animals were periodically observed for adverse effects for at least 24 hours post-dose. Fourteen days after treatment, animals were euthanized by cardiac exsanguination under isoflurane anesthesia; blood for serum preparation and liver tissue were collected for downstream analysis.

[1080] Serum TTR levels shown in Table 44 and FIG. 39 were produced using Serum TTR ELISA—Prealbumin ELISA (Aviva Systems; cat #OKIA00111) according to the manufacturer's protocol for all experimental groups and compared to the negative control (TSS).

TABLE 44
Serum TTR levels (ug/ml).

| | Serum TTR | | | |
|---|---|---|---|---|
| Guide ID | (ug/ml) | SD | % TSS | N |
| TSS | 673.7 | 44.13 | 100 | 5 |
| G021536 | 378.2 | 83.0 | 56.1 | 7 |
| G029377 | 419.3 | 83.5 | 62.2 | 9 |
| G029384 | 270.1 | 63.90 | 40.1 | 4 |
| G029392 | 375.4 | 58.23 | 55.7 | 4 |
| G029391 | 509.1 | 115.3 | 75.6 | 4 |
| G029390 | 623.2 | 144.3 | 92.5 | 4 |

[1081] Liver biopsy punches weighing between 5 and 15 mg were collected for isolation of genomic DNA. Genomic DNA was extracted using a DNA isolation kit (ZymoResearch, D3012) and samples were analyzed with NGS sequencing as described in Example 1. The editing efficiency for LNPs containing the indicated gRNAs are shown in Table 45 and illustrated in FIG. 40.

TABLE 45
Mean percent indels at the TTR locus in mouse liver samples

| Guide | Mean % editing | SD | N |
|---|---|---|---|
| TSS | 0.1 | 0 | 5 |
| G021536 | 27.2 | 4.58 | 7 |
| G029377 | 25.7 | 6.77 | 9 |
| G029384 | 34.9 | 4.05 | 4 |
| G029392 | 20.9 | 6.14 | 4 |
| G029391 | 5.4 | 2.60 | 4 |
| G029390 | 5.5 | 3.66 | 4 |

### Example 22. Dose Response Curve for NmeCas9 gRNA in PMH with Nme2Cas9

[1082] The editing efficiency of the modified gRNAs was tested with Nme2Cas9 construct in primary mouse hepatocytes (PMH). All Nine sgRNAs tested comprised the same 24nt guide sequence targeting the mouse TTR gene (mTTR).

[1083] PMH (Gibco, Lot MC931) were thawed and resuspended in hepatocyte thawing medium followed by centrifugation. The supernatant was discarded and the pelleted cells were resuspended in hepatocyte plating medium (William's E Medium (Gibco, Cat. A12176-01)) with plating supplements dexamethasone+cocktail supplement (Gibco, Cat. A15563, Lot 2459010) and FBS content (Gibco, Cat. A13450, Lot 2486425). Cells were counted and plated on Bio-coat collagen I coated 96-well plates (Corning, Ref 356407, Lot 08722018) at a concentration of 15,000 cells/well. Plated cells were allowed to settle and adhere for 4-6 hours in a tissue culture incubator at 37° C. and 5% CO2 atmosphere. After incubation cells were checked for monolayer formation and were washed once with hepatocyte maintenance medium (William's E Medium) with plating medium supplement (Gibco, Cat. A15564, Lot 2459014).

[1084] LNPs were generally prepared as described in Example 1 with a cargo of 1:2 by weight of ngRNA to mRNA. The LNPs used were prepared with a molar ratio of (500 Lipid A, 380% cholesterol, 900 DSPC, and 30% PEG2k-DMG. The LNPs were formulated with a lipid amine to RNA phosphate (N:P) molar ratio of 6. Each LNP was applied to cells using an 8 point 3-fold serial dilution starting at 450 ng of total cargo per 100 μl well at the top dose (300 ng mRNA O and 46.5 nM gRNA (about 150 ng gRNA)) as shown in Table 46. Upon treatment with LNPs, cells were incubated for 24 hours at 37° C. in William's E Medium with plating medium supplement (Gibco, Cat. A15564, Lot 2459014) and 3% o fetal bovine serum. After 72 hours, cells were harvested and analyzed by NGS as described in Example 1.

[1085] The editing efficiency for LNPs containing the indicated gRNAs, and the corresponding EC50 for each, are shown in Table 46 and illustrated in FIG. 41.

TABLE 46
Mean percent indels at the TTR locus in primary mouse hepatocytes.

| | % | nM gRNA | | | | | | | | EC50 |
|---|---|---|---|---|---|---|---|---|---|---|
| Guide | indels | 46.5 | 15.5 | 5.1 | 1.7 | 0.5 | 0.19 | 0.064 | 0.02 | (nM gRNA) |
| G021536 | Mean | 97.20 | 97.83 | 97.73 | 96.75 | 95.55 | 83.83 | 48.33 | 15.53 | 0.071 |
| | SD | 0.63 | 0.25 | 0.45 | 1.70 | 0.50 | 2.17 | 4.99 | 0.90 | |
| | N | 4.00 | 4.00 | 4.00 | 4.00 | 4.00 | 4.00 | 4.00 | 4.00 | |
| G029377 | Mean | 96.65 | 96.68 | 96.90 | 96.73 | 93.63 | 83.65 | 46.88 | 16.73 | 0.075 |
| | SD | 0.82 | 1.42 | 1.04 | 0.59 | 2.40 | 1.92 | 3.14 | 1.05 | |
| | N | 4.00 | 4.00 | 4.00 | 4.00 | 4.00 | 4.00 | 4.00 | 4.00 | |
| G029380 | Mean | 95.90 | 97.00 | 96.08 | 95.55 | 88.38 | 62.00 | 22.85 | 5.38 | 0.136 |
| | SD | 2.27 | 0.99 | 1.23 | 1.28 | 2.04 | 0.84 | 1.47 | 1.05 | |
| | N | 4.00 | 4.00 | 4.00 | 4.00 | 4.00 | 4.00 | 4.00 | 4.00 | |
| G029379 | Mean | 97.13 | 96.75 | 96.43 | 95.20 | 90.65 | 62.20 | 22.00 | 5.33 | 0.139 |
| | SD | 0.49 | 1.33 | 1.11 | 1.16 | 1.61 | 1.47 | 1.64 | 0.43 | |
| | N | 4.00 | 4.00 | 4.00 | 4.00 | 4.00 | 4.00 | 4.00 | 4.00 | |
| G029378 | Mean | 95.88 | 97.00 | 96.05 | 94.90 | 87.05 | 53.03 | 16.28 | 3.40 | 0.172 |
| | SD | 1.54 | 0.94 | 1.15 | 1.56 | 2.00 | 2.00 | 1.37 | 0.86 | |
| | N | 4.00 | 4.00 | 4.00 | 4.00 | 4.00 | 4.00 | 4.00 | 4.00 | |
| G029381 | Mean | 97.08 | 96.05 | 96.65 | 95.50 | 87.90 | 52.28 | 16.83 | 3.40 | 0.175 |
| | SD | 0.82 | 1.95 | 0.93 | 0.94 | 1.71 | 3.03 | 2.35 | 0.48 | |
| | N | 4.00 | 4.00 | 4.00 | 4.00 | 4.00 | 4.00 | 4.00 | 4.00 | |

### Example 23. Dose Response Curve for NmeCas9 gRNA in PMH with Nme2Cas9

[1086] The editing efficiency of the modified gRNAs was tested with Nme2Cas9 construct in primary mouse hepatocytes (PMH). All Nine sgRNAs tested comprised the same 24nt guide sequence targeting the mouse TTR gene (mTTR).

[1087] PMH (Gibco, Lot MC931) were thawed and resuspended in hepatocyte thawing medium followed by centrifugation. The supernatant was discarded and the pelleted cells were resuspended in hepatocyte plating medium (William's E Medium (Gibco, Cat. A12176-01)) with plating supplements dexamethasone+cocktail supplement (Gibco, Cat. A15563, Lot 2459010) and FBS content (Gibco, Cat. A13450, Lot 2486425). Cells were counted and plated on Bio-coat collagen I coated 96-well plates (Corning, Ref 356407, Lot 08722018) at a concentration of 15,000 cells/well. Plated cells were allowed to settle and adhere for 4-6 hours in a tissue culture incubator at 37° C. and 5% CO2 atmosphere. After incubation cells were checked for monolayer formation and were washed once with hepatocyte maintenance medium (William's E Medium) with plating medium supplement (Gibco, Cat. A15564, Lot 2459014).

[1088] LNPs were generally prepared as described in Example 1 with a cargo of 1:2 by weight of gRNA to mRNA O. The LNPs used were prepared with a molar ratio of 50% Lipid A, 38% cholesterol, 9% DSPC, and 3% PEG2k-DMG. The LNPs were formulated with a lipid amine to RNA phosphate (N:P) molar ratio of 6. Each LNP was applied to cells using an 8 point 3-fold serial dilution starting at 450 ng of total cargo per 100 μl well at the top dose (300 ng mRNA O and 46.5 nM gRNA (i.e., 150 ng gRNA)) as shown in Table 47. Upon treatment with LNPs, cells were incubated for 24 hours at 37° C. in William's E Medium with plating medium supplement (Gibco, Cat. A15564, Lot 2459014) and 3% fetal bovine serum. Samples were run in triplicates After 72 hours, cells were harvested and analyzed by NGS as described in Example 1.

[1089] The editing efficiency for LNPs containing the indicated gRNAs, and the corresponding EC50 for each, as shown in Table 47 and illustrated in FIG. 42.

TABLE 47
Mean percent indels at the TTR locus in primary mouse hepatocytes.

| | % | nM gRNA | | | | | | | | EC50 |
|---|---|---|---|---|---|---|---|---|---|---|
| Guide | indels | 46.5 | 15.5 | 5.1 | 1.7 | 0.5 | 0.19 | 0.064 | 0.02 | (nM gRNA) |
| G029384 | Mean | 96.70 | 97.30 | 96.57 | 95.37 | 92.70 | 78.67 | 43.77 | 13.87 | 0.077 |
| | SD | 0.85 | 0.52 | 1.71 | 1.01 | 1.95 | 3.73 | 4.00 | 1.50 | |
| | N | 3.00 | 3.00 | 3.00 | 3.00 | 3.00 | 3.00 | 3.00 | 3.00 | |
| G021536 | Mean | 97.13 | 96.91 | 96.58 | 95.77 | 90.42 | 73.29 | 36.63 | 10.49 | 0.092 |
| | SD | 0.00 | 0.23 | 0.03 | 0.76 | 1.26 | 1.96 | 1.53 | 0.10 | |
| | N | 18.00 | 18.00 | 18.00 | 18.00 | 18.00 | 18.00 | 18.00 | 18.00 | |
| G029383 | Mean | 96.93 | 96.83 | 96.13 | 94.37 | 90.50 | 73.20 | 34.77 | 9.07 | 0.094 |
| | SD | 0.90 | 1.08 | 2.21 | 2.75 | 3.05 | 2.92 | 2.23 | 0.91 | |
| | N | 3.00 | 3.00 | 3.00 | 3.00 | 3.00 | 3.00 | 3.00 | 3.00 | |
| G029388 | Mean | 96.60 | 97.03 | 96.67 | 95.23 | 89.63 | 71.13 | 34.07 | 9.90 | 0.100 |
| | SD | 0.95 | 0.98 | 2.05 | 2.80 | 0.76 | 2.75 | 3.74 | 3.12 | |
| | N | 3.00 | 3.00 | 3.00 | 3.00 | 3.00 | 3.00 | 3.00 | 3.00 | |
| G029392 | Mean | 96.57 | 95.87 | 96.60 | 95.23 | 90.30 | 72.50 | 31.13 | 6.87 | 0.101 |
| | SD | 1.47 | 2.03 | 1.47 | 2.72 | 3.15 | 1.56 | 1.74 | 0.81 | |
| | N | 3.00 | 3.00 | 3.00 | 3.00 | 3.00 | 3.00 | 3.00 | 3.00 | |
| G029382 | Mean | 96.83 | 97.37 | 96.50 | 95.87 | 89.43 | 69.10 | 33.80 | 9.87 | 0.104 |
| | SD | 0.67 | 0.47 | 1.30 | 1.12 | 3.41 | 4.92 | 4.06 | 0.61 | |
| | N | 3.00 | 3.00 | 3.00 | 3.00 | 3.00 | 3.00 | 3.00 | 3.00 | |
| G029386 | Mean | 97.17 | 97.20 | 96.23 | 95.80 | 91.70 | 71.53 | 32.57 | 9.43 | 0.105 |
| | SD | 0.55 | 1.13 | 0.38 | 1.32 | 0.95 | 0.61 | 1.62 | 0.93 | |
| | N | 3.00 | 3.00 | 3.00 | 3.00 | 3.00 | 3.00 | 3.00 | 3.00 | |
| G029385 | Mean | 96.80 | 95.90 | 96.67 | 94.87 | 87.83 | 66.95 | 25.60 | 7.20 | 0.123 |
| | SD | 0.80 | 0.14 | 1.23 | 1.53 | 3.11 | 2.47 | 2.52 | 0.87 | |
| | N | 3.00 | 3.00 | 3.00 | 3.00 | 3.00 | 3.00 | 3.00 | 3.00 | |
| G029387 | Mean | 94.07 | 95.65 | 95.23 | 94.00 | 81.90 | 56.83 | 22.67 | 5.97 | 0.149 |
| | SD | 0.15 | 0.35 | 0.71 | 0.56 | 2.69 | 1.80 | 0.47 | 0.49 | |
| | N | 3.00 | 3.00 | 3.00 | 3.00 | 3.00 | 3.00 | 3.00 | 3.00 | |
| G029391 | Mean | 95.70 | 95.77 | 95.43 | 94.30 | 85.40 | 56.03 | 19.83 | 4.70 | 0.156 |
| | SD | 1.40 | 2.49 | 2.98 | 2.96 | 3.03 | 2.62 | 2.40 | 0.69 | |
| | N | 3.00 | 3.00 | 3.00 | 3.00 | 3.00 | 3.00 | 3.00 | 3.00 | |
| G029389 | Mean | 96.80 | 96.40 | 95.87 | 94.60 | 85.53 | 54.23 | 17.63 | 3.40 | 0.164 |
| | SD | 1.14 | 0.99 | 2.32 | 1.93 | 2.16 | 4.05 | 1.75 | 0.62 | |
| | N | 3.00 | 3.00 | 3.00 | 3.00 | 3.00 | 3.00 | 3.00 | 3.00 | |
| G029390 | Mean | 96.00 | 95.40 | 94.60 | 93.07 | 77.60 | 42.13 | 11.70 | 2.20 | 0.219 |
| | SD | 1.49 | 3.49 | 3.97 | 2.97 | 2.29 | 4.10 | 2.49 | 0.70 | |
| | N | 3.00 | 3.00 | 3.00 | 3.00 | 3.00 | 3.00 | 3.00 | 3.00 | |

### Example 24. Additional Embodiments

[1090] The following numbered items provide additional support for and descriptions of the embodiments herein.

[1091] Item 1 is a guide RNA (gRNA) comprising a guide region and a conserved region, the conserved region comprising one or more of:
[1092] (a) a shortened repeat/anti-repeat region, wherein the shortened repeat/anti-repeat region lacks 2-24 nucleotides, wherein
   [1093] (i) one or more of nucleotides 37-48 and 53-64 is deleted and optionally one or more of nucleotides 37-64 is substituted relative to SEQ ID NO: 500; and
   [1094] (ii) nucleotide 36 is linked to nucleotide 65 by at least 2 nucleotides; or
[1095] (b) a shortened hairpin 1 region, wherein the shortened hairpin 1 lacks 2-10, optionally 2-8 nucleotides, wherein
   [1096] (i) one or more of nucleotides 82-86 and 91-95 is deleted and optionally one or more of positions 82-96 is substituted relative to SEQ ID NO: 500; and
   [1097] (ii) nucleotide 81 is linked to nucleotide 96 by at least 4 nucleotides; or
[1098] (c) a shortened hairpin 2 region, wherein the shortened hairpin 2 lacks 2-18, optionally 2-16 nucleotides, wherein
   [1099] (i) one or more of nucleotides 113-121 and 126-134 is deleted and optionally one or more of nucleotides 113-134 is substituted relative to SEQ ID NO: 500; and
   [1100] (ii) nucleotide 112 is linked to nucleotide 135 by at least 4 nucleotides;
[1101] wherein one or both nucleotides 144-145 are optionally deleted relative to SEQ ID NO: 500;
[1102] wherein at least 10 nucleotides are modified nucleotides.

[1103] Item 2 is the gRNA of Item 1, wherein the gRNA is a single-guide RNA (sgRNA) and wherein the gRNA comprises (a) a shortened repeat/anti-repeat region, wherein the shortened repeat/anti-repeat region lacks 2-24 nucleotides, wherein
[1104] (i) one or more of nucleotides 37-48 and 53-64 is deleted and optionally one or more of nucleotides 37-64 is substituted relative to SEQ ID NO: 500; and
[1105] (ii) nucleotide 36 is linked to nucleotide 65 by at least 2 nucleotides.

[1106] Item 3 is the gRNA of Item 1 or 2, wherein the guide region has (i) an insertion of one nucleotide or a deletion of 1-4 nucleotides within positions 1-24 relative to SEQ ID NO: 500, or (ii) a length of 24 nucleotides.

[1107] Item 4 is the gRNA of the immediately preceding Item, wherein the guide region has a length of 25, 24, 23, 22, 21, or 20 nucleotides, optionally wherein the guide region has a length of 25, 24, 23, or 22 nucleotides.

[1108] Item 5 is the gRNA of the immediately preceding Item, wherein the guide region has a length of 23-24 nucleotides.

[1109] Item 6 is the gRNA of any one of the preceding Items, wherein the gRNA further comprises a 3′ tail.

[1110] Item 7 is the gRNA of the immediately preceding Item, wherein the 3′ tail comprises 1, 2, 3, 4, 5, 6, 7, 8, 9, or 10 nucleotides.

[1111] Item 8 is the gRNA of the immediately preceding Item, wherein the 3′ tail comprises 1, 2, 3, 4, or 5 nucleotides.

[1112] Item 9 is the gRNA of any one of Items 6-8, wherein the 3′ tail terminates with a nucleotide comprising a uracil or modified uracil.

[1113] Item 10 is the gRNA of any one of Items 6-9, wherein the 3′ tail is 1 nucleotide in length.

[1114] Item 11 is the gRNA of any one of Items 6-10, wherein the 3′ tail consists of a nucleotide comprising a uracil or a modified uracil.

[1115] Item 12 is the gRNA of any one of Items 6-11, wherein the 3′ tail comprises a modification of any one or more of the nucleotides present in the 3′ tail.

[1116] Item 13 is the gRNA of any one of Items 6-12, wherein the modification of the 3′ tail is one or more of 2′-O-methyl (2′-OMe) modified nucleotide and a phosphorothioate (PS) linkage between nucleotides.

[1117] Item 14 is the gRNA of any one of the preceding Items 6-13, wherein the 3′ tail is fully modified.

[1118] Item 15 is the gRNA of any one of the preceding Items, wherein the 3′ nucleotide of the gRNA is a nucleotide comprising a uracil or a modified uracil.

[1119] Item 16 is the gRNA of any one of Items 1-5, wherein one or more of nucleotides 144 and 145 are deleted relative to SEQ ID NO: 500.

[1120] Item 17 is the gRNA of any one of Items 1-5, wherein both nucleotides 144 and 145 are deleted relative to SEQ ID NO: 500.

[1121] Item 18 is the gRNA of any one of Items 1-5, wherein the gRNA does not comprise a 3′ tail.

[1122] Item 19 is the gRNA of any one of the preceding Items, wherein the shortened repeat/anti-repeat region lacks 2-24 nucleotides.

[1123] Item 20 is the gRNA of any one of the preceding Items, wherein the shortened repeat/anti-repeat region has a length of 28, 29, 30, 31, 32, 33, 34, 35, 36, 37, 38, 39, 40, 41, 42, 43, 44, 45, 46, 47, 48, 49, or 50 nucleotides.

[1124] Item 21 is the gRNA of any one of the preceding Items, wherein the shortened repeat/anti-repeat region lacks 12-24, optionally 18-24 nucleotides, optionally 20-22 nucleotides.

[1125] Item 22 is the gRNA of any one of the preceding Items, wherein the shortened repeat/anti-repeat region has a length of 28, 29, 30, 31, 32, 33, 34, 35, 36, 37, 38, 39, or 40 nucleotides.

[1126] Item 23 is the gRNA of any one of the preceding Items, wherein the shortened repeat/anti-repeat region has a length of 28, 29, 30, 31, 32, 33, or 34 nucleotides, or 30, 31, or 32 nucleotides.

[1127] Item 24 is the gRNA of any one of the preceding Items, wherein nucleotides 37-64 of SEQ ID NO: 500 form the upper stem, and one or more base pairs of the upper stem of the shortened repeat/anti-repeat region are deleted.

[1128] Item 25 is the gRNA of any one of the preceding Items, wherein the upper stem of the shortened repeat/anti-repeat region comprises no more than one, two, three, or four base pairs.

[1129] Item 26 is the gRNA of any one of the preceding Items, wherein all of positions 39-48 and all of positions 53-62 of the upper stem of the shortened repeat/anti-repeat region are deleted, and optionally nucleotides 38 or 63 is substituted.

[1130] Item 27 is the gRNA of any one of the preceding Items, wherein all of positions 38-48 and all of positions 53-63 of the upper stem of the shortened repeat/anti-repeat region are deleted, and optionally nucleotides 37 or 64 is substituted.

[1131] Item 28 is the gRNA of any one of the preceding Items, wherein all of nucleotides 37-48 and 53-64 of the upper stem of the shortened repeat/anti-repeat region are deleted, and optionally nucleotides 36 or 65 is substituted.

[1132] Item 29 is the gRNA of any one of the preceding Items, wherein the shortened repeat/anti-repeat region has a duplex portion 11 base paired nucleotides in length.

[1133] Item 30 is the gRNA of any one of the preceding Items, wherein the shortened repeat/anti-repeat region has a single duplex portion.

[1134] Item 31 is the gRNA of any one of the preceding Items, wherein the upper stem of the shortened repeat/anti-repeat region includes one or more substitutions relative to SEQ ID NO: 500.

[1135] Item 32 is the gRNA of any one of the preceding Items, wherein one or more of nucleotides 49-52 is substituted relative to SEQ ID NO: 500.

[1136] Item 33 is the gRNA of any one of the preceding Items, wherein the shortened repeat/anti-repeat region is unsubstituted.

[1137] Item 34 is the gRNA of any one of the preceding Items, wherein the shortened repeat/anti-repeat region has 12-22 modified nucleotides

[1138] Item 35 is the gRNA of any one of the preceding Items, wherein the shortened hairpin 1 region lacks 2-10 nucleotides, optionally 2-8 or 2-4 nucleotides.

[1139] Item 36 is the gRNA of any one of the preceding Items, wherein the shortened hairpin 1 region has a length of 13, 14, 15, 16, 17, 18, 19, 20, or 21 nucleotides.

[1140] Item 37 is the gRNA of Item any one of the preceding Items, wherein the shortened hairpin 1 region has a duplex portion 4-8, optionally 7-8 base paired nucleotides in length.

[1141] Item 38 is the gRNA of Item any one of the preceding Items, wherein the shortened hairpin 1 region has a single duplex portion.

[1142] Item 39 is the gRNA of any one of the preceding Items, wherein one or two base pairs of the shortened hairpin 1 region are deleted.

[1143] Item 40 is the gRNA of any one of the preceding Items, wherein the stem of the shortened hairpin 1 region is seven or eight base paired nucleotides in length.

[1144] Item 41 is the gRNA of any one of the preceding Items, wherein one or more of positions 85-86 and one or more of nucleotides 91-92 of the shortened hairpin 1 region are deleted.

[1145] Item 42 is the gRNA of any one of the preceding Items, wherein nucleotides 86 and 91 or nucleotides 85 and 92 of the shortened hairpin 1 region are deleted.

[1146] Item 43 is the gRNA of any one of the preceding Items, wherein one or more of nucleotides 82-95 of the shortened hairpin 1 region is substituted relative to SEQ ID NO: 500.

[1147] Item 44 is the gRNA of any one of the preceding Items, wherein one or more of nucleotides 87-90 is substituted relative to SEQ ID NO: 500.

[1148] Item 45 is the gRNA of any one of the preceding Items, wherein the shortened hairpin 1 region is unsubstituted.

[1149] Item 46 is the gRNA of Item any one of the preceding Items, wherein the shortened hairpin 1 region has 6-15 modified nucleotides.

[1150] Item 47 is the gRNA of any one of the preceding Items, wherein the shortened hairpin 2 region lacks 2-18, optionally 2-16 nucleotides.

[1151] Item 48 is the gRNA of any one of the preceding Items, wherein the shortened hairpin 2 region has a length of 24, 25, 26, 27, 28, 29, 30, 31, 32, 33, 34, 35, 36, 37, 38, 39, or 40 nucleotides.

[1152] Item 49 is the gRNA of any one of the preceding Items, wherein the shortened hairpin 2 region has a length of 28, 29, 30, 31, 32, 33, or 34 nucleotides.

[1153] Item 50 is the gRNA of any one of the preceding Items, wherein one or more of nucleotides 113-121 and one or more of nucleotides 126-134 of the shortened hairpin 2 region are deleted.

[1154] Item 51 is the gRNA of any one of the preceding Items, wherein the shortened hairpin 2 region comprises an unpaired region.

[1155] Item 52 is the gRNA of any one of the preceding Items, wherein the shortened hairpin 2 region has two duplex portions.

[1156] Item 53 is the gRNA of any one of the preceding Items, wherein the shortened hairpin 2 region has a duplex portion of 4 base paired nucleotides in length.

[1157] Item 54 is the gRNA of any one of Items 52-53, wherein the shortened hairpin 2 region has a duplex portion of 4-8 base paired nucleotides in length.

[1158] Item 55 is the gRNA of any one of Items 52-54, wherein the shortened hairpin 2 region has a duplex portion of 4-6 base paired nucleotides in length.

[1159] Item 56 is the gRNA of any one of the preceding Items, wherein nucleotides 113-134 of SEQ ID NO: 500 form the upper stem, and the upper stem of the shortened hairpin 2 region comprises one, two, three, or four base pairs.

[1160] Item 57 is the gRNA of any one of the preceding Items, wherein at least one pair of nucleotides 113 and 134, nucleotides 114 and 133, nucleotides 115 and 132, nucleotides 116 and 131, nucleotides 117 and 130, nucleotides 118 and 129, nucleotides 119 and 128, nucleotides 120 and 127, and nucleotides 121 and 126 are deleted.

[1161] Item 58 is the gRNA of any one of the preceding Items, wherein all of positions 113-121 and 126-134 of the shortened hairpin 2 region are deleted.

[1162] Item 59 is the gRNA of any one of the preceding Items, wherein one or more of nucleotides 113-134 of the shortened hairpin 2 region is substituted relative to SEQ ID NO: 500.

[1163] Item 60 is the gRNA of any one of the preceding Items, wherein one or more of nucleotides 122-125 is substituted relative to SEQ ID NO: 500.

[1164] Item 61 is the gRNA of any one of the preceding Items, wherein the shortened hairpin 2 region is unsubstituted.

[1165] Item 62 is the gRNA of Item any one of the preceding Items, wherein the shortened hairpin 2 region has 6-15 modified nucleotides.

[1166] Item 63 is the gRNA of any one of the preceding Items, wherein the guide region of the gRNA comprises at least two modified nucleotides, optionally at least four modified nucleotides.

[1167] Item 64 is the gRNA of any one of the preceding Items, wherein the guide region of the gRNA comprises 1, 2, 3, 4, 5, 6, 7, 8, 9, 10, 11, or 12 modified nucleotides, optionally 1, 2, or 3 modified nucleotides.

[1168] Item 65 is the gRNA of any one of the preceding Items, wherein the guide region of the gRNA comprises 4, 5, 6, 7, 8, 9, 10, 11, or 12 modified nucleotides.

[1169] Item 66 is the gRNA of any one of the preceding Items, wherein the guide region of the gRNA comprises 6, 7, 8, 9, 10, 11, or 12 modified nucleotides.

[1170] Item 67 is the gRNA of any one of the preceding Items, wherein the guide region does not comprise a modified nucleotide 3′ of the first three nucleotides of the guide region.

[1171] Item 68 is the gRNA of any one of the preceding Items, wherein the guide region does not comprise a modified nucleotide.

[1172] Item 69 is the gRNA of any one of the preceding Items, wherein the gRNA comprises a 5′ end modification.

[1173] Item 70 is the gRNA of any one of the preceding Items, wherein the gRNA comprises a 3′ end modification.

[1174] Item 71 is the gRNA of any one of the preceding Items, wherein the gRNA comprises a 5′ end modification and a 3′ end modification.

[1175] Item 72 is the gRNA of any one of the preceding Items, comprising a modification in the upper stem region of the repeat/anti-repeat region.

[1176] Item 73 is the gRNA of any one of the preceding Items, comprising a modification in the hairpin 1 region.

[1177] Item 74 is the gRNA of any one of the preceding Items, comprising a modification in the hairpin 2 region.

[1178] Item 75 is the gRNA of any one of the preceding Items, comprising a 3′ end modification, and comprising a modification in the upper stem region of the repeat/anti-repeat region.

[1179] Item 76 is the gRNA of any one of the preceding Items, comprising a 3′ end modification, and a modification in the hairpin 1 region.

[1180] Item 77 is the gRNA of any one of the preceding Items, comprising a 3′ end modification, and a modification in the hairpin 2 region.

[1181] Item 78 is the gRNA of any one of the preceding Items, comprising a 5′ end modification, and comprising a modification in the upper stem region of the repeat/anti-repeat region.

[1182] Item 79 is the gRNA of any one of the preceding Items, comprising a 5′ end modification, and a modification in the hairpin 1 region.

[1183] Item 80 is the gRNA of any one of the preceding Items, comprising a 5′ end modification, and a modification in the hairpin 2 region.

[1184] Item 81 is the gRNA of any one of the preceding Items, comprising a 5′ end modification, a modification in the upper stem region of the repeat/anti-repeat region, and a 3′ end modification.

[1185] Item 82 is the gRNA of any one of the preceding Items, comprising a 5′ end modification, a modification in the hairpin 1 region, and a 3′ end modification.

[1186] Item 83 is the gRNA of any one of the preceding Items, comprising a 5′ end modification, a modification in the hairpin 1 region, a modification in the hairpin 2 region, and a 3′ end modification.

[1187] Item 84 is the gRNA of any one of the preceding Items, comprising a 5′ end modification, a modification in the repeat/anti-repeat region, a modification in the hairpin 1 region, a modification in the hairpin 2 region, and a 3′ end modification.

[1188] Item 85 is the gRNA of any one of Items 69-84, wherein the 5′ end modification comprises a modified nucleotide selected from a 2′-O-methyl (2′-OMe) modified nucleotide, 2′-O-(2-methoxyethyl) (2′-O-moe) modified nucleotide, a 2′-fluoro (2′-F) modified nucleotide, a phosphorothioate (PS) linkage between nucleotides, or an inverted abasic modified nucleotide.

[1189] Item 86 is the gRNA of any one of the Items 69-85, wherein the 3′ end modification comprises a modified nucleotide selected from a 2′-O-methyl (2′-OMe) modified nucleotide, 2′-O-(2-methoxyethyl) (2′-O-moe) modified nucleotide, a 2′-fluoro (2′-F) modified nucleotide, a phosphorothioate (PS) linkage between nucleotides, or an inverted abasic modified nucleotide.

[1190] Item 87 is the gRNA of any one of the Items 69-86, wherein the 5′ end modification comprises any of:
[1191] i. a modification of any one or more of the first 1, 2, 3, or 4 nucleotides;
[1192] ii. one modified nucleotide;
[1193] iii. two modified nucleotides;
[1194] iv. three modified nucleotides; and
[1195] v. four modified nucleotides.

[1196] Item 88 is the gRNA of any one of Items 69-87, wherein the 5′ end modification comprises one or more of:
[1197] i. a phosphorothioate (PS) linkage between nucleotides;
[1198] ii. a 2′-OMe modified nucleotide;
[1199] iii. a 2′-O-moe modified nucleotide;
[1200] iv. a 2′-F modified nucleotide; and
[1201] v. an inverted abasic modified nucleotide.

[1202] Item 89 is the gRNA of any one of Items 69-88, wherein the 3′ end modification comprises any of:
[1203] i. a modification of any one or more of the last 4, 3, 2, or 1 nucleotides;
[1204] ii. one modified nucleotide;
[1205] iii. two modified nucleotides;
[1206] iv. three modified nucleotides; and
[1207] v. four modified nucleotides.

[1208] Item 90 is the gRNA of any one of Items 69-89, wherein the 3′ end modification comprises one or more of:
[1209] i. a phosphorothioate (PS) linkage between nucleotides;
[1210] ii. a 2′-OMe modified nucleotide;
[1211] iii. a 2′-O-moe modified nucleotide;
[1212] iv. a 2′-F modified nucleotide; and
[1213] v. an inverted abasic modified nucleotide.

[1214] Item 91 is the gRNA of any one of Items 69-90, wherein the 5′ end modification comprises at least one PS linkage, and wherein one or more of:
[1215] i. there is one PS linkage, and the linkage is between the first and second nucleotides;
[1216] ii. there are two PS linkages between the first three nucleotides;
[1217] iii. there are PS linkages between any one or more of the first four nucleotides; and
[1218] iv. there are PS linkages between any one or more of the first five nucleotides.

[1219] Item 92 is the gRNA of Item 91, wherein the 5′ end modification further comprises at least one 2′-OMe, 2′-O-moe, inverted abasic, or 2′-F modified nucleotide.

[1220] Item 93 is the gRNA of any one of the preceding Items, wherein the 5′ end modification comprises:
[1221] i. a modification of one or more of the first 1-4 nucleotides, wherein the modification is a PS linkage, inverted abasic nucleotide, 2′-OMe, 2′-O-moe, or 2′-F;
[1222] ii. a modification to the first nucleotide with 2′-OMe, 2′-O-moe, or 2′-F, and an optional one or two PS linkages to the next nucleotide or the first nucleotide of the 3′ tail;
[1223] iii. a modification to the first or second nucleotide with 2′-OMe, 2′-O-moe, or 2′-F, and optionally one or more PS linkages;
[1224] iv. a modification to the first, second, or third nucleotides with 2′-OMe, 2′-O-moe, or 2′-F, and optionally one or more PS linkages; or
[1225] v. a modification to the first, second, third, or forth nucleotides with 2′-OMe, 2′-O-moe, or 2′-F, and optionally one or more PS linkages.

[1226] Item 94 is the gRNA of any one of the preceding Items, wherein the 3′ end modification comprises at least one PS linkage, and wherein one or more of:
[1227] i. there is one PS linkage, and the linkage is between the last and second to last nucleotides;
[1228] ii. there are two PS linkages between the last three nucleotides; and
[1229] iii. there are PS linkages between any one or more of the last four nucleotides.

[1230] Item 95 is the gRNA of Item 94, wherein the 3′ end modification further comprises at least one 2′-OMe, 2′-O-moe, inverted abasic, or 2′-F modified nucleotide.

[1231] Item 96 is the gRNA of any one of the preceding Items, wherein the 3′ end modification comprises:
[1232] i. a modification of one or more of the last 1-4 nucleotides, wherein the modification is a PS linkage, inverted abasic nucleotide, 2′-OMe, 2′-O-moe, or 2′-F;
[1233] ii. a modification to the last nucleotide with 2′-OMe, 2′-O-moe, or 2′-F, and an optional one or two PS linkages to the next nucleotide or the first nucleotide of the 3′ tail;
[1234] iii. a modification to the last or second to last nucleotide with 2′-OMe, 2′-O-moe, or 2′-F, and optionally one or more PS linkages;
[1235] iv. a modification to the last, second to last, or third to last nucleotides with 2′-OMe, 2′-O-moe, or 2′-F, and optionally one or more PS linkages; or
[1236] v. a modification to the last, second to last, third to last, or fourth to last nucleotides with 2′-OMe, 2′-O-moe, or 2′-F, and optionally one or more PS linkages.

[1237] Item 97 is the gRNA of any one of the preceding Items, wherein the modification in the repeat/anti-repeat region, the hairpin 1 region, or the hairpin 2 region comprises a modified nucleotide selected from 2′-O-methyl (2′-OMe) modified nucleotide, 2′-O-(2-methoxyethyl) (2′-O-moe) modified nucleotide, a 2′-fluoro (2′-F) modified nucleotide, or a phosphorothioate (PS) linkage between nucleotides.

[1238] Item 98 is the gRNA of any one of the preceding Items, wherein the modification in the repeat/anti-repeat region, the hairpin 1 region, or the hairpin 2 region comprises a modified nucleotide selected from 2′-O-methyl (2′-OMe) modified nucleotide, a 2′-fluoro (2′-F) modified nucleotide, or a phosphorothioate (PS) linkage between nucleotides.

[1239] Item 99 is the gRNA of any one of the preceding Items, wherein the modification in the repeat/anti-repeat region, the hairpin 1 region, or the hairpin 2 region comprises a modified nucleotide selected from 2′-O-methyl (2′-OMe) modified nucleotide or a phosphorothioate (PS) linkage between nucleotides.

[1240] Item 100 is the gRNA of any one of the preceding Items, wherein at least 20%, 30%, 40%, or 50% of the nucleotides are modified nucleotides.

[1241] Item 101 is the gRNA of Item 100, wherein the gRNA comprises modified nucleotides selected from 2′-O-methyl (2′-OMe) modified nucleotide, 2′-O-(2-methoxyethyl) (2′-O-moe) modified nucleotide, a 2′-fluoro (2′-F) modified nucleotide, a phosphorothioate (PS) linkage between nucleotides, or combinations thereof.

[1242] Item 102 is the gRNA of Item 100 or 101 comprises modified nucleotides selected from 2′-O-methyl (2′-OMe) modified nucleotide, a 2′-fluoro (2′-F) modified nucleotide, a phosphorothioate (PS) linkage between nucleotides, or combinations thereof.

[1243] Item 103 is the gRNA of any one of the preceding Items, wherein nucleotides 1-3 of the guide region are modified and nucleotides in the guide region other than nucleotides 1-3 are not modified.

[1244] Item 104 is the gRNA of any one of the preceding Items, wherein a 3′ tail of nucleotide 144 is present in the gRNA, and comprises 2′-O-Me modified nucleotides at nucleotides 141-144 and two PS linkages between nucleotides 141-142 and 142-143 respectively.

[1245] Item 105 is the gRNA of any one of the preceding Items, wherein one or more positions of 49-52, 87-90, or 122-125 is substituted.

[1246] Item 106 is a single guide RNA (sgRNA) comprising any one of SEQ ID NOs: 1-9.

[1247] Item 107 is the gRNA of any one of the preceding Items, comprising a nucleotide sequence having at least 99, 98, 97, 96, 95, 94, 93, 92, 91, 90, 85, 80, 75, or 70% identity to the nucleotide sequence of any one of SEQ ID Nos: 1-9.

[1248] Item 108 is the gRNA of any one of the preceding Items, comprising a nucleotide sequence having at least 99, 98, 97, 96, 95, 94, 93, 92, 91, 90, 85, 80, 75, or 70% identity to the nucleotide sequence of any one of SEQ ID Nos: 1-9, wherein the modification at each nucleotide of the gRNA that corresponds to a nucleotide of the reference sequence identifier in Table 1 is identical to or equivalent to the modification shown in the reference sequence identifier in Table 2.

[1249] Item 109 is the gRNA of any one of the preceding Items, comprising a nucleotide sequence having at least 99, 98, 97, 96, 95, 94, 93, 92, 91, or 90% identity to the sequence from X to the 3′ end of the nucleotide sequence of any one of SEQ ID Nos: 1-5, 7, 8, 101-291, and 301-494 where X is the first nucleotide of the conserved region.

[1250] Item 110 is the gRNA of any one of Items 106-109, further comprising a 3′ tail comprising a 2′-O-Me modified nucleotide.

[1251] Item 111 is the gRNA of any one of the preceding Items, wherein the gRNA directs a nuclease to a target sequence for binding.

[1252] Item 112 is the gRNA of any one of the preceding Items, wherein the gRNA directs a nuclease to a target sequence for inducing a double-strand break within the target sequence.

[1253] Item 113 is the gRNA of any one of the preceding Items, wherein the gRNA directs a nuclease to a target sequence for inducing a single-strand break within the target sequence.

[1254] Item 114 is the gRNA of any one of Items 111-113, wherein the nuclease is a Nine Cas9.

[1255] Item 115 is the gRNA of any one of the preceding Items, wherein the gRNA comprises a conservative substitution, optionally wherein the conservative substitution maintains at least one base pair.

[1256] Item 116 is a composition comprising a gRNA of any one of the preceding Items, associated with a lipid nanoparticle (LNP).

[1257] Item 117 is an LNP composition comprising a gRNA of any one of the preceding Items.

[1258] Item 118 is a composition comprising the gRNA of any one of Items 1-115, or the composition of any one of Items 116-117, further comprising a nuclease or an mRNA which encodes the nuclease.

[1259] Item 119 is the composition of Item 118, wherein the nuclease is a Cas protein.

[1260] Item 120 is the composition of Item 119, wherein the Cas protein is a Nme Cas9.

[1261] Item 121 is the composition of Item 120, wherein the Nine Cas9 is an Nme1 Cas9, an Nme2 Cas9, or an Nme3 Cas9.

[1262] Item 122 is the composition of any one of Items 118-121, wherein the nuclease has a double strand cleaving activity.

[1263] Item 123 is the composition of any one of Items 118-122, wherein the nuclease has a nickase activity.

[1264] Item 124 is the composition of any one of Items 118-123, wherein the nuclease has a dCas DNA binding domain.

[1265] Item 125 is the composition of any one of Items 118-124, wherein the nuclease is modified.

[1266] Item 126 is the composition of Item 125, wherein the modified nuclease comprises a heterologous functional domain.

[1267] Item 127 is the composition of Item 126 wherein the heterologous functional domain is a deaminase.

[1268] Item 128 is the composition of Item 127, further comprising a UGI or a mRNA encoding a UGI.

[1269] Item 129 is the composition of any one of Items 127-128, wherein the heterologous functional domain is a cytidine deaminase.

[1270] Item 130 is the composition of any one of Items 125-129, wherein the modified nuclease comprises a nuclear localization signal (NLS).

[1271] Item 131 is the composition of any one of Items 118-130, comprising an mRNA which encodes the nuclease.

[1272] Item 132 is the composition of Item 131, wherein the mRNA comprises the sequence of any one of SEQ ID NOs: 636-638.

[1273] Item 133 is a pharmaceutical formulation comprising the gRNA of any one of Items 1-115 or the composition of any one of Items 116-132 and a pharmaceutically acceptable carrier.

[1274] Item 134 is a method of modifying a target DNA comprising, delivering a Cas protein or a nucleic acid encoding a Cas protein, and any one or more of the following to a cell:
[1275] i. the gRNA of any one of Items 1-115;
[1276] ii. the composition of any one of Items 116-132; and
[1277] iii. the pharmaceutical formulation of Item 133.

[1278] Item 135 is the method of Item 134, wherein the method results in an insertion or deletion in a gene.

[1279] Item 136 is the method of Item 134 or 135, wherein the method results in at least one base edit.

[1280] Item 137 is the method of any one of Items 134-136, further comprising delivering to the cell a template, wherein at least a part of the template incorporates into a target DNA at or near a double strand break site induced by the Cas protein.

[1281] Item 138 is the gRNA of any one of Items 1-115, the composition of Items 116-132, or the pharmaceutical formulation of Item 133 for use in preparing a medicament for treating a disease or disorder.

[1282] Item 139 is use of the gRNA of any one of Items 1-115, the composition of Items 116-132, or the pharmaceutical formulation of Item 133 in the manufacture of a medicament for treating a disease or disorder.

The application's sequence listing, which the Patent Office published only in electronic form, follows.

SEQUENCE LISTING (952 sequences)

SEQ ID NO: 1 - RNA, 102 nt, synthetic construct
  misc_feature 1..102: note = Synthetic
  misc_difference 21..25: note = up to 5 may be deleted
  source 1..102: mol_type = other RNA
nnnnnnnnnnnnnnnnnnnnnnnnngttgtagctccctgaaaccgttgctacaataaggccgtcgaaagatgtgccgcaacgctctgccttctggcatcgtt

SEQ ID NO: 2 - RNA, 106 nt, synthetic construct
  misc_feature 1..106: note = Synthetic
  misc_difference 21..25: note = up to 5 may be deleted
  source 1..106: mol_type = other RNA
nnnnnnnnnnnnnnnnnnnnnnnnngttgtagctccctgaaaccgttgctacaataaggccgtcgaaagatgtgccgcaacgctctgccttctggcatcgtttatt

SEQ ID NO: 3 - RNA, 108 nt, synthetic construct
  misc_feature 1..108: note = Synthetic
  misc_difference 21..25: note = up to 5 may be deleted
  source 1..108: mol_type = other RNA
nnnnnnnnnnnnnnnnnnnnnnnnngttgtagctccctggaaacccgttgctacaataaggccgtcgaaagatgtgccgcaacgctctgccttctggcatcgtttatt

SEQ ID NO: 4 - RNA, 101 nt, synthetic construct
  misc_feature 1..101: note = Synthetic
  misc_feature 1..101: note = See specification as filed for detailed description of substitutions and modifications
  source 1..101: mol_type = other RNA
nnnnnnnnnnnnnnnnnnnnnnnngttgtagctccctgaaaccgttgctacaataaggccgtcgaaagatgtgccgcaacgctctgccttctggcatcgtt

SEQ ID NO: 5 - RNA, 102 nt, synthetic construct; identical to SEQ ID NO: 1
  misc_feature 1..102: note = Synthetic
  misc_feature 1..102: note = See specification as filed for detailed description of substitutions and modifications
  misc_difference 21..25: note = up to 5 may be deleted
  source 1..102: mol_type = other RNA

SEQ ID NO: 6 - RNA, 77 nt, synthetic construct
  misc_feature 1..77: note = Synthetic
  misc_feature 1..77: note = See specification as filed for detailed description of substitutions and modifications
  source 1..77: mol_type = other RNA
gttgtagctccctgaaaccgttgctacaataaggccgtcgaaagatgtgccgcaacgctctgccttctggcatcgtt

SEQ ID NO: 7 - RNA, 101 nt, synthetic construct; identical to SEQ ID NO: 4
  misc_feature 1..101: note = Synthetic
  misc_feature 1..101: note = See specification as filed for detailed description of substitutions and modifications
  source 1..101: mol_type = other RNA

SEQ ID NO: 8 - RNA, 102 nt, synthetic construct; identical to SEQ ID NO: 1
  misc_feature 1..102: note = Synthetic
  misc_feature 1..102: note = See specification as filed for detailed description of substitutions and modifications
  misc_difference 21..25: note = up to 5 may be deleted
  source 1..102: mol_type = other RNA

SEQ ID NO: 9 - RNA, 77 nt, synthetic construct; identical to SEQ ID NO: 6
  misc_feature 1..77: note = Synthetic
  misc_feature 1..77: note = See specification as filed for detailed description of substitutions and modifications
  source 1..77: mol_type = other RNA

SEQ ID NO: 10 - RNA, 106 nt, synthetic construct
  misc_feature 1..106: note = Synthetic
  misc_difference 21..25: note = up to 5 may be deleted
  source 1..106: mol_type = other RNA
nnnnnnnnnnnnnnnnnnnnnnnnngttgtagctcccttcgaaagaccgttgctacaataaggccgtcgaaagatgtgccgcaacgctctgccttctggcatcgtt

SEQ ID NO: 11 - RNA, 105 nt, synthetic construct
  misc_feature 1..105: note = Synthetic
  misc_feature 1..105: note = See specification as filed for detailed description of substitutions and modifications
  source 1..105: mol_type = other RNA
nnnnnnnnnnnnnnnnnnnnnnnngttgtagctcccttcgaaagaccgttgctacaataaggccgtcgaaagatgtgccgcaacgctctgccttctggcatcgtt

SEQ ID NO: 12 - RNA, 101 nt, synthetic construct; identical to SEQ ID NO: 4
  misc_feature 1..101: note = Synthetic
  misc_feature 1..101: note = See specification as filed for detailed description of substitutions and modifications
  source 1..101: mol_type = other RNA

SEQ ID NO: 13 - RNA, 102 nt, synthetic construct; identical to SEQ ID NO: 1
  misc_feature 1..102: note = Synthetic
  misc_feature 1..102: note = See specification as filed for detailed description of substitutions and modifications
  misc_difference 21..25: note = up to 5 may be deleted
  source 1..102: mol_type = other RNA

SEQ ID NO: 14 - RNA, 77 nt, synthetic construct; identical to SEQ ID NO: 6
  misc_feature 1..77: note = Synthetic
  misc_feature 1..77: note = See specification as filed for detailed description of substitutions and modifications
  source 1..77: mol_type = other RNA

SEQ ID NO: 15 - RNA, 101 nt, synthetic construct; identical to SEQ ID NO: 4
  misc_feature 1..101: note = Synthetic
  misc_feature 1..101: note = See specification as filed for detailed description of substitutions and modifications
  source 1..101: mol_type = other RNA

SEQ ID NO: 16 - RNA, 102 nt, synthetic construct; identical to SEQ ID NO: 1
  misc_feature 1..102: note = Synthetic
  misc_feature 1..102: note = See specification as filed for detailed description of substitutions and modifications
  misc_difference 21..25: note = up to 5 may be deleted
  source 1..102: mol_type = other RNA

SEQ ID NO: 17 - RNA, 77 nt, synthetic construct; identical to SEQ ID NO: 6
  misc_feature 1..77: note = Synthetic
  misc_feature 1..77: note = See specification as filed for detailed description of substitutions and modifications
  source 1..77: mol_type = other RNA

SEQ ID NO: 18 - RNA, 105 nt, synthetic construct; identical to SEQ ID NO: 11
  misc_feature 1..105: note = Synthetic
  misc_feature 1..105: note = See specification as filed for detailed description of substitutions and modifications
  source 1..105: mol_type = other RNA

SEQ ID NO: 19 - RNA, 101 nt, synthetic construct; identical to SEQ ID NO: 4
  misc_feature 1..101: note = Synthetic
  misc_feature 1..101: note = See specification as filed for detailed description of substitutions and modifications
  source 1..101: mol_type = other RNA

SEQ ID NO: 20 - skipped

SEQ ID NO: 21 - RNA, 102 nt, synthetic construct; identical to SEQ ID NO: 1
  misc_feature 1..102: note = Synthetic
  misc_feature 1..102: note = See specification as filed for detailed description of substitutions and modifications
  misc_difference 21..25: note = up to 5 may be deleted
  source 1..102: mol_type = other RNA

SEQ ID NO: 22 - RNA, 77 nt, synthetic construct; identical to SEQ ID NO: 6
  misc_feature 1..77: note = Synthetic
  misc_feature 1..77: note = See specification as filed for detailed description of substitutions and modifications
  source 1..77: mol_type = other RNA

SEQ ID NO: 23 - RNA, 101 nt, synthetic construct; identical to SEQ ID NO: 4
  misc_feature 1..101: note = Synthetic
  misc_feature 1..101: note = See specification as filed for detailed description of substitutions and modifications
  source 1..101: mol_type = other RNA

SEQ ID NO: 24 - RNA, 102 nt, synthetic construct; identical to SEQ ID NO: 1
  misc_feature 1..102: note = Synthetic
  misc_feature 1..102: note = See specification as filed for detailed description of substitutions and modifications
  misc_difference 21..25: note = up to 5 may be deleted
  source 1..102: mol_type = other RNA

SEQ ID NO: 25 - RNA, 77 nt, synthetic construct; identical to SEQ ID NO: 6
  misc_feature 1..77: note = Synthetic
  misc_feature 1..77: note = See specification as filed for detailed description of substitutions and modifications
  source 1..77: mol_type = other RNA

SEQ ID NO: 26 - RNA, 105 nt, synthetic construct; identical to SEQ ID NO: 11
  misc_feature 1..105: note = Synthetic
  misc_feature 1..105: note = See specification as filed for detailed description of substitutions and modifications
  source 1..105: mol_type = other RNA

SEQ ID NO: 27 - RNA, 101 nt, synthetic construct; identical to SEQ ID NO: 4
  misc_feature 1..101: note = Synthetic
  misc_feature 1..101: note = See specification as filed for detailed description of substitutions and modifications
  source 1..101: mol_type = other RNA

SEQ ID NO: 28 - RNA, 102 nt, synthetic construct; identical to SEQ ID NO: 1
  misc_feature 1..102: note = Synthetic
  misc_feature 1..102: note = See specification as filed for detailed description of substitutions and modifications
  misc_difference 21..25: note = up to 5 may be deleted
  source 1..102: mol_type = other RNA

SEQ ID NO: 29 - RNA, 77 nt, synthetic construct; identical to SEQ ID NO: 6
  misc_feature 1..77: note = Synthetic
  misc_feature 1..77: note = See specification as filed for detailed description of substitutions and modifications
  source 1..77: mol_type = other RNA

SEQ ID NO: 30 - RNA, 101 nt, synthetic construct; identical to SEQ ID NO: 4
  misc_feature 1..101: note = Synthetic
  misc_feature 1..101: note = See specification as filed for detailed description of substitutions and modifications
  source 1..101: mol_type = other RNA

SEQ ID NO: 31 - RNA, 102 nt, synthetic construct; identical to SEQ ID NO: 1
  misc_feature 1..102: note = Synthetic
  misc_feature 1..102: note = See specification as filed for detailed description of substitutions and modifications
  misc_difference 21..25: note = up to 5 may be deleted
  source 1..102: mol_type = other RNA

SEQ ID NO: 32 - RNA, 77 nt, synthetic construct; identical to SEQ ID NO: 6
  misc_feature 1..77: note = Synthetic
  misc_feature 1..77: note = See specification as filed for detailed description of substitutions and modifications
  source 1..77: mol_type = other RNA

SEQ ID NO: 33 - RNA, 102 nt, synthetic construct; identical to SEQ ID NO: 1
  misc_feature 1..102: note = Synthetic
  misc_feature 1..102: note = See specification as filed for detailed description of substitutions and modifications
  misc_difference 21..25: note = up to 5 may be deleted
  source 1..102: mol_type = other RNA

SEQ ID NO: 34 - RNA, 105 nt, synthetic construct; identical to SEQ ID NO: 11
  misc_feature 1..105: note = Synthetic
  misc_feature 1..105: note = See specification as filed for detailed description of substitutions and modifications
  source 1..105: mol_type = other RNA

SEQ ID NO: 35 - RNA, 106 nt, synthetic construct; identical to SEQ ID NO: 10
  misc_feature 1..106: note = Synthetic
  misc_feature 1..106: note = See specification as filed for detailed description of substitutions and modifications
  misc_difference 21..25: note = up to 5 may be deleted
  source 1..106: mol_type = other RNA

SEQ ID NO: 36 - RNA, 81 nt, synthetic construct
  misc_feature 1..81: note = Synthetic
  misc_feature 1..81: note = See specification as filed for detailed description of substitutions and modifications
  source 1..81: mol_type = other RNA
gttgtagctcccttcgaaagaccgttgctacaataaggccgtcgaaagatgtgccgcaacgctctgccttctggcatcgtt

SEQ ID NO: 37 - RNA, 106 nt, synthetic construct; identical to SEQ ID NO: 10
  misc_feature 1..106: note = Synthetic
  misc_feature 1..106: note = See specification as filed for detailed description of substitutions and modifications
  misc_difference 21..25: note = up to 5 may be deleted
  source 1..106: mol_type = other RNA

SEQ ID NO: 38 - RNA, 81 nt, synthetic construct; identical to SEQ ID NO: 36
  misc_feature 1..81: note = Synthetic
  misc_feature 1..81: note = See specification as filed for detailed description of substitutions and modifications
  source 1..81: mol_type = other RNA

SEQ ID NO: 39 - RNA, 106 nt, synthetic construct; identical to SEQ ID NO: 10
  misc_feature 1..106: note = Synthetic
  misc_feature 1..106: note = See specification as filed for detailed description of substitutions and modifications
  misc_difference 21..25: note = up to 5 may be deleted
  source 1..106: mol_type = other RNA

SEQ ID NO: 40 - RNA, 81 nt, synthetic construct; identical to SEQ ID NO: 36
  misc_feature 1..81: note = Synthetic
  misc_feature 1..81: note = See specification as filed for detailed description of substitutions and modifications
  source 1..81: mol_type = other RNA

SEQ ID NO: 41 - RNA, 106 nt, synthetic construct; identical to SEQ ID NO: 10
  misc_feature 1..106: note = Synthetic
  misc_feature 1..106: note = See specification as filed for detailed description of substitutions and modifications
  misc_difference 21..25: note = up to 5 may be deleted
  source 1..106: mol_type = other RNA

SEQ ID NO: 42 - RNA, 81 nt, synthetic construct; identical to SEQ ID NO: 36
  misc_feature 1..81: note = Synthetic
  misc_feature 1..81: note = See specification as filed for detailed description of substitutions and modifications
  source 1..81: mol_type = other RNA

SEQ ID NO: 43-100 - skipped (58 entries)

SEQ ID NO: 101 - RNA, 107 nt, synthetic construct
  misc_feature 1..107: note = Synthetic
  source 1..107: mol_type = other RNA
gtgtgtccctctccccacccgtccgttgtagctccctggaaacccgttgctacaataaggccgtcgaaagatgtgccgcaacgctctgccttctggcatcgtttatt

SEQ ID NO: 102 - RNA, 107 nt, synthetic construct
  misc_feature 1..107: note = Synthetic
  source 1..107: mol_type = other RNA
ggcctggctgatgaggccgcacatgttgtagctccctgaaaccgttgctacaataaggccgtctgaaaagatgtgccgcaacgctctgccttctggcatcgtttatc

SEQ ID NO: 103 - RNA, 105 nt, synthetic construct
  misc_feature 1..105: note = Synthetic
  source 1..105: mol_type = other RNA
ggcctggctgatgaggccgcacatgttgtagctccctgaaaccgttgctacaataaggccgtcgaaagatgtgccgcaacgctctgccttctggcatcgtttatc

SEQ ID NO: 104 - RNA, 107 nt, synthetic construct; identical to SEQ ID NO: 101
  misc_feature 1..107: note = Synthetic
  source 1..107: mol_type = other RNA

SEQ ID NO: 105 - RNA, 107 nt, synthetic construct; identical to SEQ ID NO: 101
  misc_feature 1..107: note = Synthetic
  source 1..107: mol_type = other RNA

SEQ ID NO: 106 - RNA, 107 nt, synthetic construct; identical to SEQ ID NO: 101
  misc_feature 1..107: note = Synthetic
  source 1..107: mol_type = other RNA

SEQ ID NO: 107 - RNA, 107 nt, synthetic construct; identical to SEQ ID NO: 101
  misc_feature 1..107: note = Synthetic
  source 1..107: mol_type = other RNA

SEQ ID NO: 108 - RNA, 107 nt, synthetic construct; identical to SEQ ID NO: 101
  misc_feature 1..107: note = Synthetic
  source 1..107: mol_type = other RNA

SEQ ID NO: 109 - RNA, 107 nt, synthetic construct; identical to SEQ ID NO: 101
  misc_feature 1..107: note = Synthetic
  source 1..107: mol_type = other RNA

SEQ ID NO: 110 - RNA, 107 nt, synthetic construct; identical to SEQ ID NO: 101
  misc_feature 1..107: note = Synthetic
  source 1..107: mol_type = other RNA

SEQ ID NO: 111 - RNA, 107 nt, synthetic construct; identical to SEQ ID NO: 101
  misc_feature 1..107: note = Synthetic
  source 1..107: mol_type = other RNA

SEQ ID NO: 112 - RNA, 107 nt, synthetic construct; identical to SEQ ID NO: 101
  misc_feature 1..107: note = Synthetic
  source 1..107: mol_type = other RNA

SEQ ID NO: 113 - RNA, 107 nt, synthetic construct; identical to SEQ ID NO: 101
  misc_feature 1..107: note = Synthetic
  source 1..107: mol_type = other RNA

SEQ ID NO: 114 - RNA, 107 nt, synthetic construct; identical to SEQ ID NO: 101
  misc_feature 1..107: note = Synthetic
  source 1..107: mol_type = other RNA

SEQ ID NO: 115 - RNA, 107 nt, synthetic construct; identical to SEQ ID NO: 101
  misc_feature 1..107: note = Synthetic
  source 1..107: mol_type = other RNA

SEQ ID NO: 116 - RNA, 107 nt, synthetic construct
  misc_feature 1..107: note = Synthetic
  source 1..107: mol_type = other RNA
gtgtgtccctctccccacccgtccgttgtagctccctggaaacccgttgctacaataaggccgtcgaaagatgtgccgcaacgctctgccgaaaggcatcgtttatt

SEQ ID NO: 117 - RNA, 103 nt, synthetic construct
  misc_feature 1..103: note = Synthetic
  source 1..103: mol_type = other RNA
gtgtgtccctctccccacccgtccgttgtagctccctggaaacccgttgctacaataaggccgtcgaaagatgtgccgcaacgctctgccttctggcatcgtt

SEQ ID NO: 118 - RNA, 105 nt, synthetic construct
  misc_feature 1..105: note = Synthetic
  source 1..105: mol_type = other RNA
gtgtgtccctctccccacccgtccgttgtagctccctgaaaccgttgctacaataaggccgtcgaaagatgtgccgcaacgctctgccttctggcatcgtttatt

SEQ ID NO: 119 - RNA, 105 nt, synthetic construct; identical to SEQ ID NO: 118
  misc_feature 1..105: note = Synthetic
  source 1..105: mol_type = other RNA

SEQ ID NO: 120 - RNA, 105 nt, synthetic construct; identical to SEQ ID NO: 118
  misc_feature 1..105: note = Synthetic
  source 1..105: mol_type = other RNA

SEQ ID NO: 121 - RNA, 105 nt, synthetic construct; identical to SEQ ID NO: 118
  misc_feature 1..105: note = Synthetic
  source 1..105: mol_type = other RNA

SEQ ID NO: 122 - RNA, 105 nt, synthetic construct; identical to SEQ ID NO: 118
  misc_feature 1..105: note = Synthetic
  source 1..105: mol_type = other RNA

SEQ ID NO: 123 - RNA, 105 nt, synthetic construct; identical to SEQ ID NO: 118
  misc_feature 1..105: note = Synthetic
  source 1..105: mol_type = other RNA

SEQ ID NO: 124 - RNA, 105 nt, synthetic construct; identical to SEQ ID NO: 118
  misc_feature 1..105: note = Synthetic
  source 1..105: mol_type = other RNA

SEQ ID NO: 125 - RNA, 105 nt, synthetic construct; identical to SEQ ID NO: 118
  misc_feature 1..105: note = Synthetic
  source 1..105: mol_type = other RNA

SEQ ID NO: 126 - RNA, 105 nt, synthetic construct
  misc_feature 1..105: note = Synthetic
  source 1..105: mol_type = other RNA
gtgtgtccctctccccacccgtccgttgtagctccctgaaaccgttgctacaataaggccgtcgaaagatgtgccgcaacgctctgccgaaaggcatcgtttatt

SEQ ID NO: 127 - RNA, 101 nt, synthetic construct
  misc_feature 1..101: note = Synthetic
  source 1..101: mol_type = other RNA
gtgtgtccctctccccacccgtccgttgtagctccctgaaaccgttgctacaataaggccgtcgaaagatgtgccgcaacgctctgccttctggcatcgtt

SEQ ID NO: 128 - RNA, 105 nt, synthetic construct; identical to SEQ ID NO: 118
  misc_feature 1..105: note = Synthetic
  source 1..105: mol_type = other RNA

SEQ ID NO: 129 - RNA, 105 nt, synthetic construct; identical to SEQ ID NO: 118
  misc_feature 1..105: note = Synthetic
  source 1..105: mol_type = other RNA

SEQ ID NO: 130 - RNA, 105 nt, synthetic construct; identical to SEQ ID NO: 118
  misc_feature 1..105: note = Synthetic
  source 1..105: mol_type = other RNA

SEQ ID NO: 131 - RNA, 105 nt, synthetic construct; identical to SEQ ID NO: 118
  misc_feature 1..105: note = Synthetic
  source 1..105: mol_type = other RNA

SEQ ID NO: 132 - RNA, 105 nt, synthetic construct; identical to SEQ ID NO: 126
  misc_feature 1..105: note = Synthetic
  source 1..105: mol_type = other RNA

SEQ ID NO: 133 - RNA, 101 nt, synthetic construct; identical to SEQ ID NO: 127
  misc_feature 1..101: note = Synthetic
  source 1..101: mol_type = other RNA

SEQ ID NO: 134 - RNA, 105 nt, synthetic construct; identical to SEQ ID NO: 118
  misc_feature 1..105: note = Synthetic
  source 1..105: mol_type = other RNA

SEQ ID NO: 135 - RNA, 105 nt, synthetic construct; identical to SEQ ID NO: 118
  misc_feature 1..105: note = Synthetic
  source 1..105: mol_type = other RNA

SEQ ID NO: 136 - RNA, 105 nt, synthetic construct; identical to SEQ ID NO: 118
  misc_feature 1..105: note = Synthetic
  source 1..105: mol_type = other RNA

SEQ ID NO: 137 - RNA, 105 nt, synthetic construct; identical to SEQ ID NO: 118
  misc_feature 1..105: note = Synthetic
  source 1..105: mol_type = other RNA

SEQ ID NO: 138 - RNA, 105 nt, synthetic construct; identical to SEQ ID NO: 118
  misc_feature 1..105: note = Synthetic
  source 1..105: mol_type = other RNA

SEQ ID NO: 139 - RNA, 105 nt, synthetic construct; identical to SEQ ID NO: 126
  misc_feature 1..105: note = Synthetic
  source 1..105: mol_type = other RNA

SEQ ID NO: 140 - RNA, 101 nt, synthetic construct; identical to SEQ ID NO: 127
  misc_feature 1..101: note = Synthetic
  source 1..101: mol_type = other RNA

SEQ ID NO: 141 - RNA, 105 nt, synthetic construct; identical to SEQ ID NO: 118
  misc_feature 1..105: note = Synthetic
  source 1..105: mol_type = other RNA

SEQ ID NO: 142 - RNA, 105 nt, synthetic construct; identical to SEQ ID NO: 118
  misc_feature 1..105: note = Synthetic
  source 1..105: mol_type = other RNA

SEQ ID NO: 143 - RNA, 105 nt, synthetic construct; identical to SEQ ID NO: 118
  misc_feature 1..105: note = Synthetic
  source 1..105: mol_type = other RNA

SEQ ID NO: 144 - RNA, 105 nt, synthetic construct; identical to SEQ ID NO: 118
  misc_feature 1..105: note = Synthetic
  source 1..105: mol_type = other RNA

SEQ ID NO: 145 - RNA, 105 nt, synthetic construct; identical to SEQ ID NO: 126
  misc_feature 1..105: note = Synthetic
  source 1..105: mol_type = other RNA

SEQ ID NO: 146 - RNA, 101 nt, synthetic construct; identical to SEQ ID NO: 127
  misc_feature 1..101: note = Synthetic
  source 1..101: mol_type = other RNA

SEQ ID NO: 147 - RNA, 107 nt, synthetic construct
  misc_feature 1..107: note = Synthetic
  source 1..107: mol_type = other RNA
ggcctggctgatgaggccgcacatgttgtagctccctcgaaagccgttgctacaataaggccgtcgaaagatgtgccgcaacgctctgccttctggcatcgtttatt

SEQ ID NO: 148 - RNA, 101 nt, synthetic construct; identical to SEQ ID NO: 127
  misc_feature 1..101: note = Synthetic
  source 1..101: mol_type = other RNA

SEQ ID NO: 149 - RNA, 101 nt, synthetic construct; identical to SEQ ID NO: 127
  misc_feature 1..101: note = Synthetic
  source 1..101: mol_type = other RNA

SEQ ID NO: 150 - RNA, 101 nt, synthetic construct; identical to SEQ ID NO: 127
  misc_feature 1..101: note = Synthetic
  source 1..101: mol_type = other RNA

SEQ ID NO: 151 - RNA, 101 nt, synthetic construct; identical to SEQ ID NO: 127
  misc_feature 1..101: note = Synthetic
  source 1..101: mol_type = other RNA

SEQ ID NO: 152 - RNA, 101 nt, synthetic construct; identical to SEQ ID NO: 127
  misc_feature 1..101: note = Synthetic
  source 1..101: mol_type = other RNA

SEQ ID NO: 153 - RNA, 101 nt, synthetic construct; identical to SEQ ID NO: 127
  misc_feature 1..101: note = Synthetic
  source 1..101: mol_type = other RNA

SEQ ID NO: 154 - RNA, 101 nt, synthetic construct; identical to SEQ ID NO: 127
  misc_feature 1..101: note = Synthetic
  source 1..101: mol_type = other RNA

SEQ ID NO: 155 - RNA, 101 nt, synthetic construct; identical to SEQ ID NO: 127
  misc_feature 1..101: note = Synthetic
  source 1..101: mol_type = other RNA

SEQ ID NO: 156 - RNA, 101 nt, synthetic construct; identical to SEQ ID NO: 127
  misc_feature 1..101: note = Synthetic
  source 1..101: mol_type = other RNA

SEQ ID NO: 157 - RNA, 101 nt, synthetic construct; identical to SEQ ID NO: 127
  misc_feature 1..101: note = Synthetic
  source 1..101: mol_type = other RNA

SEQ ID NO: 158 - RNA, 101 nt, synthetic construct; identical to SEQ ID NO: 127
  misc_feature 1..101: note = Synthetic
  source 1..101: mol_type = other RNA

SEQ ID NO: 159 - RNA, 101 nt, synthetic construct; identical to SEQ ID NO: 127
  misc_feature 1..101: note = Synthetic
  source 1..101: mol_type = other RNA

SEQ ID NO: 160 - RNA, 101 nt, synthetic construct
  misc_feature 1..101: note = Synthetic
  source 1..101: mol_type = other RNA
gtgtgtccctctccccacccgtccgttgtagctccctgaaaccgttgctacaataaggccgtcgaaagatgtgccgcaacgctctgccgaaaggcatcgtt

SEQ ID NO: 161 - RNA, 101 nt, synthetic construct; identical to SEQ ID NO: 127
  misc_feature 1..101: note = Synthetic
  source 1..101: mol_type = other RNA

SEQ ID NO: 162 - RNA, 101 nt, synthetic construct; identical to SEQ ID NO: 127
  misc_feature 1..101: note = Synthetic
  source 1..101: mol_type = other RNA

SEQ ID NO: 163 - RNA, 101 nt, synthetic construct; identical to SEQ ID NO: 127
  misc_feature 1..101: note = Synthetic
  source 1..101: mol_type = other RNA

SEQ ID NO: 164 - RNA, 101 nt, synthetic construct; identical to SEQ ID NO: 127
  misc_feature 1..101: note = Synthetic
  source 1..101: mol_type = other RNA

SEQ ID NO: 165 - RNA, 101 nt, synthetic construct; identical to SEQ ID NO: 127
  misc_feature 1..101: note = Synthetic
  source 1..101: mol_type = other RNA

SEQ ID NO: 166 - RNA, 101 nt, synthetic construct; identical to SEQ ID NO: 127
  misc_feature 1..101: note = Synthetic
  source 1..101: mol_type = other RNA

SEQ ID NO: 167 - RNA, 101 nt, synthetic construct; identical to SEQ ID NO: 127
  misc_feature 1..101: note = Synthetic
  source 1..101: mol_type = other RNA

SEQ ID NO: 168 - RNA, 101 nt, synthetic construct; identical to SEQ ID NO: 127
  misc_feature 1..101: note = Synthetic
  source 1..101: mol_type = other RNA

SEQ ID NO: 169 - RNA, 101 nt, synthetic construct; identical to SEQ ID NO: 127
  misc_feature 1..101: note = Synthetic
  source 1..101: mol_type = other RNA

SEQ ID NO: 170 - RNA, 101 nt, synthetic construct; identical to SEQ ID NO: 127
  misc_feature 1..101: note = Synthetic
  source 1..101: mol_type = other RNA

SEQ ID NO: 171 - RNA, 101 nt, synthetic construct; identical to SEQ ID NO: 127
  misc_feature 1..101: note = Synthetic
  source 1..101: mol_type = other RNA

SEQ ID NO: 172 - RNA, 101 nt, synthetic construct; identical to SEQ ID NO: 127
  misc_feature 1..101: note = Synthetic
  source 1..101: mol_type = other RNA

SEQ ID NO: 173 - RNA, 102 nt, synthetic construct
  misc_feature 1..102: note = Synthetic
  source 1..102: mol_type = other RNA
gtgtgtccctctccccacccgtccgttgtagctccctgaaaccgttgctacaataaggccgtcgaaagatgtgccgcaacgctctgccttctggcatcgttt

SEQ ID NO: 174 - RNA, 103 nt, synthetic construct
  misc_feature 1..103: note = Synthetic
  source 1..103: mol_type = other RNA
gtgtgtccctctccccacccgtccgttgtagctccctgaaaccgttgctacaataaggccgtcgaaagatgtgccgcaacgctctgccttctggcatcgttta

SEQ ID NO: 175 - RNA, 104 nt, synthetic construct
  misc_feature 1..104: note = Synthetic
  source 1..104: mol_type = other RNA
gtgtgtccctctccccacccgtccgttgtagctccctgaaaccgttgctacaataaggccgtcgaaagatgtgccgcaacgctctgccttctggcatcgtttat

SEQ ID NO: 176 - RNA, 105 nt, synthetic construct
  misc_feature 1..105: note = Synthetic
  source 1..105: mol_type = other RNA
gtgtgtccctctccccacccgtccgttgtagctcccttggaaaccacgttgctacaataaggccgtcgaaagatgtgccgcaacgctctgccttctggcatcgtt

SEQ ID NO: 177 - RNA, 99 nt, synthetic construct
  misc_feature 1..99: note = Synthetic
  source 1..99: mol_type = other RNA
gtgtgtccctctccccacccgtccgttgtagctcccgaaacgttgctacaataaggccgtcgaaagatgtgccgcaacgctctgccttctggcatcgtt

SEQ ID NO: 178 - RNA, 97 nt, synthetic construct
  misc_feature 1..97: note = Synthetic
  source 1..97: mol_type = other RNA
gtgtgtccctctccccacccgtccgttgtagctccgaaacttgctacaataaggccgtcgaaagatgtgccgcaacgctctgccttctggcatcgtt

SEQ ID NO: 179 - RNA, 101 nt, synthetic construct; identical to SEQ ID NO: 127
  misc_feature 1..101: note = Synthetic
  source 1..101: mol_type = other RNA

SEQ ID NO: 180 - RNA, 101 nt, synthetic construct; identical to SEQ ID NO: 127
  misc_feature 1..101: note = Synthetic
  source 1..101: mol_type = other RNA

SEQ ID NO: 181 - RNA, 101 nt, synthetic construct; identical to SEQ ID NO: 160
  misc_feature 1..101: note = Synthetic
  source 1..101: mol_type = other RNA

SEQ ID NO: 182 - RNA, 101 nt, synthetic construct; identical to SEQ ID NO: 160
  misc_feature 1..101: note = Synthetic
  source 1..101: mol_type = other RNA

SEQ ID NO: 183 - RNA, 101 nt, synthetic construct; identical to SEQ ID NO: 127
  misc_feature 1..101: note = Synthetic
  source 1..101: mol_type = other RNA

SEQ ID NO: 184 - RNA, 101 nt, synthetic construct; identical to SEQ ID NO: 127
  misc_feature 1..101: note = Synthetic
  source 1..101: mol_type = other RNA

SEQ ID NO: 185 - RNA, 101 nt, synthetic construct; identical to SEQ ID NO: 127
  misc_feature 1..101: note = Synthetic
  source 1..101: mol_type = other RNA

SEQ ID NO: 186 - RNA, 101 nt, synthetic construct; identical to SEQ ID NO: 127
  misc_feature 1..101: note = Synthetic
  source 1..101: mol_type = other RNA

SEQ ID NO: 187 - RNA, 101 nt, synthetic construct; identical to SEQ ID NO: 127
  misc_feature 1..101: note = Synthetic
  source 1..101: mol_type = other RNA

SEQ ID NO: 188 - RNA, 103 nt, synthetic construct
  misc_feature 1..103: note = Synthetic
  source 1..103: mol_type = other RNA
gtgtgtccctctccccacccgtccgttgtagctccctgaaaccgttgctacaataaggccgtctgaaaagatgtgccgcaacgctctgccttctggcatcgtt

SEQ ID NO: 189 - RNA, 103 nt, synthetic construct
  misc_feature 1..103: note = Synthetic
  source 1..103: mol_type = other RNA
gtgtgtccctctccccacccgtccgttgtagctccctgaaaccgttgctacaataaggccgtcgaaagatgtgccgcaacgctctgcccttctgggcatcgtt

SEQ ID NO: 190 - RNA, 105 nt, synthetic construct
  misc_feature 1..105: note = Synthetic
  source 1..105: mol_type = other RNA
gtgtgtccctctccccacccgtccgttgtagctccctgaaaccgttgctacaataaggccgtctgaaaagatgtgccgcaacgctctgcccttctgggcatcgtt

SEQ ID NO: 191 - RNA, 103 nt, synthetic construct; identical to SEQ ID NO: 188
  misc_feature 1..103: note = Synthetic
  source 1..103: mol_type = other RNA

SEQ ID NO: 192 - RNA, 103 nt, synthetic construct; identical to SEQ ID NO: 189
  misc_feature 1..103: note = Synthetic
  source 1..103: mol_type = other RNA

SEQ ID NO: 193 - RNA, 105 nt, synthetic construct; identical to SEQ ID NO: 190
  misc_feature 1..105: note = Synthetic
  source 1..105: mol_type = other RNA

SEQ ID NO: 194 - RNA, 107 nt, synthetic construct
  misc_feature 1..107: note = Synthetic
  source 1..107: mol_type = other RNA
tgaggaccgccctgggcctgggaggttgtagctccctcgaaagccgttgctacaataaggccgtcgaaagatgtgccgcaacgctctgccttctggcatcgtttatt

SEQ ID NO: 195 - RNA, 101 nt, synthetic construct
  misc_feature 1..101: note = Synthetic
  source 1..101: mol_type = other RNA
ggggccagcttcagacacaaatacgttgtagctccctgaaaccgttgctacaataaggccgtcgaaagatgtgccgcaacgctctgccttctggcatcgtt

SEQ ID NO: 196 - RNA, 101 nt, synthetic construct
  misc_feature 1..101: note = Synthetic
  source 1..101: mol_type = other RNA
ttttcacagccaacgactctggccgttgtagctccctgaaaccgttgctacaataaggccgtcgaaagatgtgccgcaacgctctgccttctggcatcgtt

SEQ ID NO: 197 - RNA, 101 nt, synthetic construct
  misc_feature 1..101: note = Synthetic
  source 1..101: mol_type = other RNA
catcagaggacatttggattctccgttgtagctccctgaaaccgttgctacaataaggccgtcgaaagatgtgccgcaacgctctgccttctggcatcgtt

SEQ ID NO: 198 - RNA, 101 nt, synthetic construct
  misc_feature 1..101: note = Synthetic
  source 1..101: mol_type = other RNA
catggaacggggaaatgccaagtggttgtagctccctgaaaccgttgctacaataaggccgtcgaaagatgtgccgcaacgctctgccttctggcatcgtt

SEQ ID NO: 199 - RNA, 101 nt, synthetic construct
  misc_feature 1..101: note = Synthetic
  source 1..101: mol_type = other RNA
aaatcgtactggaagacacttggcgttgtagctccctgaaaccgttgctacaataaggccgtcgaaagatgtgccgcaacgctctgccttctggcatcgtt

SEQ ID NO: 200 - RNA, 101 nt, synthetic construct
  misc_feature 1..101: note = Synthetic
  source 1..101: mol_type = other RNA
aatcgtactggaagacacttggcagttgtagctccctgaaaccgttgctacaataaggccgtcgaaagatgtgccgcaacgctctgccttctggcatcgtt

SEQ ID NO: 201 - RNA, 101 nt, synthetic construct
  misc_feature 1..101: note = Synthetic
  source 1..101: mol_type = other RNA
tctggccatcgccactacaccatcgttgtagctccctgaaaccgttgctacaataaggccgtcgaaagatgtgccgcaacgctctgccttctggcatcgtt

SEQ ID NO: 202 - RNA, 101 nt, synthetic construct
  misc_feature 1..101: note = Synthetic
  source 1..101: mol_type = other RNA
ctggccatcgccactacaccatcggttgtagctccctgaaaccgttgctacaataaggccgtcgaaagatgtgccgcaacgctctgccttctggcatcgtt

SEQ ID NO: 203 - RNA, 101 nt, synthetic construct
  misc_feature 1..101: note = Synthetic
  source 1..101: mol_type = other RNA
accatcgcagccctgctcagcccagttgtagctccctgaaaccgttgctacaataaggccgtcgaaagatgtgccgcaacgctctgccttctggcatcgtt

SEQ ID NO: 204 - RNA, 101 nt, synthetic construct
  misc_feature 1..101: note = Synthetic
  source 1..101: mol_type = other RNA
tggactggtatttgtgtctgaagcgttgtagctccctgaaaccgttgctacaataaggccgtcgaaagatgtgccgcaacgctctgccttctggcatcgtt

SEQ ID NO: 205 - RNA, 101 nt, synthetic construct
  misc_feature 1..101: note = Synthetic
  source 1..101: mol_type = other RNA
ctgcctcggacagcatccaggactgttgtagctccctgaaaccgttgctacaataaggccgtcgaaagatgtgccgcaacgctctgccttctggcatcgtt

SEQ ID NO: 206 - RNA, 101 nt, synthetic construct
  misc_feature 1..101: note = Synthetic
  source 1..101: mol_type = other RNA
ctacaagcttacccagaggcaaaggttgtagctccctgaaaccgttgctacaataaggccgtcgaaagatgtgccgcaacgctctgccttctggcatcgtt

SEQ ID NO: 207 - RNA, 101 nt, synthetic construct
  misc_feature 1..101: note = Synthetic
  source 1..101: mol_type = other RNA
cagaattgagagactcagcccagggttgtagctccctgaaaccgttgctacaataaggccgtcgaaagatgtgccgcaacgctctgccttctggcatcgtt

SEQ ID NO: 208 - RNA, 101 nt, synthetic construct
  misc_feature 1..101: note = Synthetic
  source 1..101: mol_type = other RNA
gatccacaagctcctgacaggatggttgtagctccctgaaaccgttgctacaataaggccgtcgaaagatgtgccgcaacgctctgccttctggcatcgtt

SEQ ID NO: 209 - RNA, 101 nt, synthetic construct
  misc_feature 1..101: note = Synthetic
  source 1..101: mol_type = other RNA
atccacaagctcctgacaggatgggttgtagctccctgaaaccgttgctacaataaggccgtcgaaagatgtgccgcaacgctctgccttctggcatcgtt

SEQ ID NO: 210 - RNA, 101 nt, synthetic construct
  misc_feature 1..101: note = Synthetic
  source 1..101: mol_type = other RNA
ggactggtatttgtgtctgaagctgttgtagctccctgaaaccgttgctacaataaggccgtcgaaagatgtgccgcaacgctctgccttctggcatcgtt

SEQ ID NO: 211 - RNA, 101 nt, synthetic construct
  misc_feature 1..101: note = Synthetic
  source 1..101: mol_type = other RNA
tgctgatccctgccaagctgactcgttgtagctccctgaaaccgttgctacaataaggccgtcgaaagatgtgccgcaacgctctgccttctggcatcgtt

SEQ ID NO: 212 - RNA, 101 nt, synthetic construct
  misc_feature 1..101: note = Synthetic
  source 1..101: mol_type = other RNA
cagcaacccccagaattgagagacgttgtagctccctgaaaccgttgctacaataaggccgtcgaaagatgtgccgcaacgctctgccttctggcatcgtt

SEQ ID NO: 213 - RNA, 101 nt, synthetic construct
  misc_feature 1..101: note = Synthetic
  source 1..101: mol_type = other RNA
gcttctcctggtgaaggggcttttgttgtagctccctgaaaccgttgctacaataaggccgtcgaaagatgtgccgcaacgctctgccttctggcatcgtt

SEQ ID NO: 214 - RNA, 101 nt, synthetic construct
  misc_feature 1..101: note = Synthetic
  source 1..101: mol_type = other RNA
ccaagtgtcttccagtacgatttggttgtagctccctgaaaccgttgctacaataaggccgtcgaaagatgtgccgcaacgctctgccttctggcatcgtt

SEQ ID NO: 215 - RNA, 101 nt, synthetic construct
  misc_feature 1..101: note = Synthetic
  source 1..101: mol_type = other RNA
cgatggccagagtcgttggctgtggttgtagctccctgaaaccgttgctacaataaggccgtcgaaagatgtgccgcaacgctctgccttctggcatcgtt

SEQ ID NO: 216 - RNA, 101 nt, synthetic construct
  misc_feature 1..101: note = Synthetic
  source 1..101: mol_type = other RNA
gtttaataagaatgcttcacggcagttgtagctccctgaaaccgttgctacaataaggccgtcgaaagatgtgccgcaacgctctgccttctggcatcgtt

SEQ ID NO: 217 - RNA, 101 nt, synthetic construct
  misc_feature 1..101: note = Synthetic
  source 1..101: mol_type = other RNA
ttggagtcagcttggcagggatcagttgtagctccctgaaaccgttgctacaataaggccgtcgaaagatgtgccgcaacgctctgccttctggcatcgtt

SEQ ID NO: 218 - RNA, 101 nt, synthetic construct
  misc_feature 1..101: note = Synthetic
  source 1..101: mol_type = other RNA
ggaaggagggggtataaaagccccgttgtagctccctgaaaccgttgctacaataaggccgtcgaaagatgtgccgcaacgctctgccttctggcatcgtt

SEQ ID NO: 219 - RNA, 101 nt, synthetic construct
  misc_feature 1..101: note = Synthetic
  source 1..101: mol_type = other RNA
acaggatggcttcccttcgactctgttgtagctccctgaaaccgttgctacaataaggccgtcgaaagatgtgccgcaacgctctgccttctggcatcgtt

SEQ ID NO: 220 - RNA, 101 nt, synthetic construct
  misc_feature 1..101: note = Synthetic
  source 1..101: mol_type = other RNA
ctggactggtatttgtgtctgaaggttgtagctccctgaaaccgttgctacaataaggccgtcgaaagatgtgccgcaacgctctgccttctggcatcgtt

SEQ ID NO: 221 - RNA, 101 nt, synthetic construct
  misc_feature 1..101: note = Synthetic
  source 1..101: mol_type = other RNA
ctctgatggtcaaagtcctggatggttgtagctccctgaaaccgttgctacaataaggccgtcgaaagatgtgccgcaacgctctgccttctggcatcgtt

SEQ ID NO: 222 - RNA, 101 nt, synthetic construct
  misc_feature 1..101: note = Synthetic
  source 1..101: mol_type = other RNA
gaaggagtgtacagagtagaactggttgtagctccctgaaaccgttgctacaataaggccgtcgaaagatgtgccgcaacgctctgccttctggcatcgtt

SEQ ID NO: 223 - RNA, 101 nt, synthetic construct
  misc_feature 1..101: note = Synthetic
  source 1..101: mol_type = other RNA
aggtggttttcacagccaacgactgttgtagctccctgaaaccgttgctacaataaggccgtcgaaagatgtgccgcaacgctctgccttctggcatcgtt

SEQ ID NO: 224 - RNA, 101 nt, synthetic construct
  misc_feature 1..101: note = Synthetic
  source 1..101: mol_type = other RNA
gccaacgactctggccatcgccacgttgtagctccctgaaaccgttgctacaataaggccgtcgaaagatgtgccgcaacgctctgccttctggcatcgtt

SEQ ID NO: 225 - RNA, 101 nt, synthetic construct
  misc_feature 1..101: note = Synthetic
  source 1..101: mol_type = other RNA
tacagcaccacggctgtcgtcagcgttgtagctccctgaaaccgttgctacaataaggccgtcgaaagatgtgccgcaacgctctgccttctggcatcgtt

SEQ ID NO: 226 - RNA, 101 nt, synthetic construct
  misc_feature 1..101: note = Synthetic
  source 1..101: mol_type = other RNA
acagcaccacggctgtcgtcagcagttgtagctccctgaaaccgttgctacaataaggccgtcgaaagatgtgccgcaacgctctgccttctggcatcgtt

SEQ ID NO: 227 - RNA, 101 nt, synthetic construct
  misc_feature 1..101: note = Synthetic
  source 1..101: mol_type = other RNA
taaaccgtgttagcagctcaggaagttgtagctccctgaaaccgttgctacaataaggccgtcgaaagatgtgccgcaacgctctgccttctggcatcgtt

SEQ ID NO: 228 - RNA, 101 nt, synthetic construct
  misc_feature 1..101: note = Synthetic
  source 1..101: mol_type = other RNA
gaagatgccgtgaagcattcttatgttgtagctccctgaaaccgttgctacaataaggccgtcgaaagatgtgccgcaacgctctgccttctggcatcgtt

SEQ ID NO: 229 - RNA, 101 nt, synthetic construct
  misc_feature 1..101: note = Synthetic
  source 1..101: mol_type = other RNA
gatgccgtgaagcattcttattaagttgtagctccctgaaaccgttgctacaataaggccgtcgaaagatgtgccgcaacgctctgccttctggcatcgtt

SEQ ID NO: 230 - RNA, 101 nt, synthetic construct
  misc_feature 1..101: note = Synthetic
  source 1..101: mol_type = other RNA
tcctggtgaaggggcttttataccgttgtagctccctgaaaccgttgctacaataaggccgtcgaaagatgtgccgcaacgctctgccttctggcatcgtt

SEQ ID NO: 231 - RNA, 101 nt, synthetic construct
  misc_feature 1..101: note = Synthetic
  source 1..101: mol_type = other RNA
ttctcctggtgaaggggcttttatgttgtagctccctgaaaccgttgctacaataaggccgtcgaaagatgtgccgcaacgctctgccttctggcatcgtt

SEQ ID NO: 232 - RNA, 101 nt, synthetic construct
  misc_feature 1..101: note = Synthetic
  source 1..101: mol_type = other RNA
cttctcctggtgaaggggcttttagttgtagctccctgaaaccgttgctacaataaggccgtcgaaagatgtgccgcaacgctctgccttctggcatcgtt

SEQ ID NO: 233 - RNA, 101 nt, synthetic construct
  misc_feature 1..101: note = Synthetic
  source 1..101: mol_type = other RNA
tctacagcagggctgcctcggacagttgtagctccctgaaaccgttgctacaataaggccgtcgaaagatgtgccgcaacgctctgccttctggcatcgtt

SEQ ID NO: 234 - RNA, 101 nt, synthetic construct
  misc_feature 1..101: note = Synthetic
  source 1..101: mol_type = other RNA
tttggtgtccagttctactctgtagttgtagctccctgaaaccgttgctacaataaggccgtcgaaagatgtgccgcaacgctctgccttctggcatcgtt

SEQ ID NO: 235 - RNA, 101 nt, synthetic construct
  misc_feature 1..101: note = Synthetic
  source 1..101: mol_type = other RNA
cagggctgcgatggtgtagtggcggttgtagctccctgaaaccgttgctacaataaggccgtcgaaagatgtgccgcaacgctctgccttctggcatcgtt

SEQ ID NO: 236 - RNA, 101 nt, synthetic construct
  misc_feature 1..101: note = Synthetic
  source 1..101: mol_type = other RNA
gatgctactgctttggcaagatccgttgtagctccctgaaaccgttgctacaataaggccgtcgaaagatgtgccgcaacgctctgccttctggcatcgtt

SEQ ID NO: 237 - RNA, 101 nt, synthetic construct
  misc_feature 1..101: note = Synthetic
  source 1..101: mol_type = other RNA
ctgacaggatggcttcccttcgacgttgtagctccctgaaaccgttgctacaataaggccgtcgaaagatgtgccgcaacgctctgccttctggcatcgtt

SEQ ID NO: 238 - RNA, 101 nt, synthetic construct
  misc_feature 1..101: note = Synthetic
  source 1..101: mol_type = other RNA
gcggagtctggagagctgcacggggttgtagctccctgaaaccgttgctacaataaggccgtcgaaagatgtgccgcaacgctctgccttctggcatcgtt

SEQ ID NO: 239 - RNA, 101 nt, synthetic construct
  misc_feature 1..101: note = Synthetic
  source 1..101: mol_type = other RNA
gccactacaccatcgcagccctgcgttgtagctccctgaaaccgttgctacaataaggccgtcgaaagatgtgccgcaacgctctgccttctggcatcgtt

SEQ ID NO: 240 - RNA, 101 nt, synthetic construct
  misc_feature 1..101: note = Synthetic
  source 1..101: mol_type = other RNA
cctacagcaccacggctgtcgtcagttgtagctccctgaaaccgttgctacaataaggccgtcgaaagatgtgccgcaacgctctgccttctggcatcgtt

SEQ ID NO: 241 - RNA, 101 nt, synthetic construct
  misc_feature 1..101: note = Synthetic
  source 1..101: mol_type = other RNA
ctacagcaccacggctgtcgtcaggttgtagctccctgaaaccgttgctacaataaggccgtcgaaagatgtgccgcaacgctctgccttctggcatcgtt

SEQ ID NO: 242 - RNA, 101 nt, synthetic construct
  misc_feature 1..101: note = Synthetic
  source 1..101: mol_type = other RNA
ccccctccttccaacccaggctgcgttgtagctccctgaaaccgttgctacaataaggccgtcgaaagatgtgccgcaacgctctgccttctggcatcgtt

SEQ ID NO: 243 - RNA, 101 nt, synthetic construct
  misc_feature 1..101: note = Synthetic
  source 1..101: mol_type = other RNA
aaggggcttttataccccctccttgttgtagctccctgaaaccgttgctacaataaggccgtcgaaagatgtgccgcaacgctctgccttctggcatcgtt

SEQ ID NO: 244 - RNA, 101 nt, synthetic construct
  misc_feature 1..101: note = Synthetic
  source 1..101: mol_type = other RNA
gagcttgtggatctgtgtgacggcgttgtagctccctgaaaccgttgctacaataaggccgtcgaaagatgtgccgcaacgctctgccttctggcatcgtt

SEQ ID NO: 245 - RNA, 101 nt, synthetic construct
  misc_feature 1..101: note = Synthetic
  source 1..101: mol_type = other RNA
accgcggggccagcttcagacacagttgtagctccctgaaaccgttgctacaataaggccgtcgaaagatgtgccgcaacgctctgccttctggcatcgtt

SEQ ID NO: 246 - RNA, 101 nt, synthetic construct
  misc_feature 1..101: note = Synthetic
  source 1..101: mol_type = other RNA
atcgctcacaggatcactcaccgcgttgtagctccctgaaaccgttgctacaataaggccgtcgaaagatgtgccgcaacgctctgccttctggcatcgtt

SEQ ID NO: 247 - RNA, 101 nt, synthetic construct
  misc_feature 1..101: note = Synthetic
  source 1..101: mol_type = other RNA
ttttacagccacgtctacagcagggttgtagctccctgaaaccgttgctacaataaggccgtcgaaagatgtgccgcaacgctctgccttctggcatcgtt

SEQ ID NO: 248 - RNA, 101 nt, synthetic construct
  misc_feature 1..101: note = Synthetic
  source 1..101: mol_type = other RNA
tcccatggtgggctttctacaagcgttgtagctccctgaaaccgttgctacaataaggccgtcgaaagatgtgccgcaacgctctgccttctggcatcgtt

SEQ ID NO: 249 - RNA, 101 nt, synthetic construct
  misc_feature 1..101: note = Synthetic
  source 1..101: mol_type = other RNA
gtggtgagcccgtgcagctctccagttgtagctccctgaaaccgttgctacaataaggccgtcgaaagatgtgccgcaacgctctgccttctggcatcgtt

SEQ ID NO: 250 - RNA, 101 nt, synthetic construct
  misc_feature 1..101: note = Synthetic
  source 1..101: mol_type = other RNA
ctcatctgtggtgagcccgtgcaggttgtagctccctgaaaccgttgctacaataaggccgtcgaaagatgtgccgcaacgctctgccttctggcatcgtt

SEQ ID NO: 251 - RNA, 101 nt, synthetic construct
  misc_feature 1..101: note = Synthetic
  source 1..101: mol_type = other RNA
ttctacaaacttctcatctgtggtgttgtagctccctgaaaccgttgctacaataaggccgtcgaaagatgtgccgcaacgctctgccttctggcatcgtt

SEQ ID NO: 252 - RNA, 101 nt, synthetic construct
  misc_feature 1..101: note = Synthetic
  source 1..101: mol_type = other RNA
cttctacaaacttctcatctgtgggttgtagctccctgaaaccgttgctacaataaggccgtcgaaagatgtgccgcaacgctctgccttctggcatcgtt

SEQ ID NO: 253 - RNA, 101 nt, synthetic construct
  misc_feature 1..101: note = Synthetic
  source 1..101: mol_type = other RNA
atccgcgaattcatggaacggggagttgtagctccctgaaaccgttgctacaataaggccgtcgaaagatgtgccgcaacgctctgccttctggcatcgtt

SEQ ID NO: 254 - RNA, 101 nt, synthetic construct
  misc_feature 1..101: note = Synthetic
  source 1..101: mol_type = other RNA
ccaaacaacttggtgtgtccacttgttgtagctccctgaaaccgttgctacaataaggccgtcgaaagatgtgccgcaacgctctgccttctggcatcgtt

SEQ ID NO: 255 - RNA, 101 nt, synthetic construct
  misc_feature 1..101: note = Synthetic
  source 1..101: mol_type = other RNA
tctcaattctgggggttgctgacggttgtagctccctgaaaccgttgctacaataaggccgtcgaaagatgtgccgcaacgctctgccttctggcatcgtt

SEQ ID NO: 256 - RNA, 101 nt, synthetic construct
  misc_feature 1..101: note = Synthetic
  source 1..101: mol_type = other RNA
gctactgctttggcaagatcctgggttgtagctccctgaaaccgttgctacaataaggccgtcgaaagatgtgccgcaacgctctgccttctggcatcgtt

SEQ ID NO: 257 - RNA, 101 nt, synthetic construct
  misc_feature 1..101: note = Synthetic
  source 1..101: mol_type = other RNA
ttctttctttaaaaagtttgatcggttgtagctccctgaaaccgttgctacaataaggccgtcgaaagatgtgccgcaacgctctgccttctggcatcgtt

SEQ ID NO: 258 - RNA, 101 nt, synthetic construct
  misc_feature 1..101: note = Synthetic
  source 1..101: mol_type = other RNA
ccatgacctccccaagatggaaaggttgtagctccctgaaaccgttgctacaataaggccgtcgaaagatgtgccgcaacgctctgccttctggcatcgtt

SEQ ID NO: 259 - RNA, 101 nt, synthetic construct
  misc_feature 1..101: note = Synthetic
  source 1..101: mol_type = other RNA
gcaagttgccaggagcacccatgagttgtagctccctgaaaccgttgctacaataaggccgtcgaaagatgtgccgcaacgctctgccttctggcatcgtt

SEQ ID NO: 260 - RNA, 101 nt, synthetic construct
  misc_feature 1..101: note = Synthetic
  source 1..101: mol_type = other RNA
agcaagttgccaggagcacccatggttgtagctccctgaaaccgttgctacaataaggccgtcgaaagatgtgccgcaacgctctgccttctggcatcgtt

SEQ ID NO: 261 - RNA, 101 nt, synthetic construct
  misc_feature 1..101: note = Synthetic
  source 1..101: mol_type = other RNA
tcaagcaagttgccaggagcacccgttgtagctccctgaaaccgttgctacaataaggccgtcgaaagatgtgccgcaacgctctgccttctggcatcgtt

SEQ ID NO: 262 - RNA, 101 nt, synthetic construct
  misc_feature 1..101: note = Synthetic
  source 1..101: mol_type = other RNA
tcttcctcaagcaagttgccaggagttgtagctccctgaaaccgttgctacaataaggccgtcgaaagatgtgccgcaacgctctgccttctggcatcgtt

SEQ ID NO: 263 - RNA, 101 nt, synthetic construct
  misc_feature 1..101: note = Synthetic
  source 1..101: mol_type = other RNA
atcttcctcaagcaagttgccagggttgtagctccctgaaaccgttgctacaataaggccgtcgaaagatgtgccgcaacgctctgccttctggcatcgtt

SEQ ID NO: 264 - RNA, 101 nt, synthetic construct
  misc_feature 1..101: note = Synthetic
  source 1..101: mol_type = other RNA
tggtccactctgctttctgacctagttgtagctccctgaaaccgttgctacaataaggccgtcgaaagatgtgccgcaacgctctgccttctggcatcgtt

SEQ ID NO: 265 - RNA, 101 nt, synthetic construct
  misc_feature 1..101: note = Synthetic
  source 1..101: mol_type = other RNA
tgaacggttggtccactctgctttgttgtagctccctgaaaccgttgctacaataaggccgtcgaaagatgtgccgcaacgctctgccttctggcatcgtt

SEQ ID NO: 266 - RNA, 101 nt, synthetic construct
  misc_feature 1..101: note = Synthetic
  source 1..101: mol_type = other RNA
cagattgtgtgcttttaatagctagttgtagctccctgaaaccgttgctacaataaggccgtcgaaagatgtgccgcaacgctctgccttctggcatcgtt

SEQ ID NO: 267 - RNA, 101 nt, synthetic construct
  misc_feature 1..101: note = Synthetic
  source 1..101: mol_type = other RNA
tgggaaaacactactgtgcatctagttgtagctccctgaaaccgttgctacaataaggccgtcgaaagatgtgccgcaacgctctgccttctggcatcgtt

SEQ ID NO: 268 - RNA, 101 nt, synthetic construct
  misc_feature 1..101: note = Synthetic
  source 1..101: mol_type = other RNA
aggaagataggtcagaaagcagaggttgtagctccctgaaaccgttgctacaataaggccgtcgaaagatgtgccgcaacgctctgccttctggcatcgtt

SEQ ID NO: 269 - RNA, 101 nt, synthetic construct
  misc_feature 1..101: note = Synthetic
  source 1..101: mol_type = other RNA
ctgggaaaacactactgtgcatctgttgtagctccctgaaaccgttgctacaataaggccgtcgaaagatgtgccgcaacgctctgccttctggcatcgtt

SEQ ID NO: 270 - RNA, 101 nt, synthetic construct
  misc_feature 1..101: note = Synthetic
  source 1..101: mol_type = other RNA
ggcctacttttcagtattgtgattgttgtagctccctgaaaccgttgctacaataaggccgtcgaaagatgtgccgcaacgctctgccttctggcatcgtt

SEQ ID NO: 271 - RNA, 101 nt, synthetic construct
  misc_feature 1..101: note = Synthetic
  source 1..101: mol_type = other RNA
tggcctacttttcagtattgtgatgttgtagctccctgaaaccgttgctacaataaggccgtcgaaagatgtgccgcaacgctctgccttctggcatcgtt

SEQ ID NO: 272 - RNA, 101 nt, synthetic construct
  misc_feature 1..101: note = Synthetic
  source 1..101: mol_type = other RNA
ttagtcactaaaggttataaaaaagttgtagctccctgaaaccgttgctacaataaggccgtcgaaagatgtgccgcaacgctctgccttctggcatcgtt

SEQ ID NO: 273 - RNA, 101 nt, synthetic construct
  misc_feature 1..101: note = Synthetic
  source 1..101: mol_type = other RNA
tttagtcactaaaggttataaaaagttgtagctccctgaaaccgttgctacaataaggccgtcgaaagatgtgccgcaacgctctgccttctggcatcgtt

SEQ ID NO: 274 - RNA, 101 nt, synthetic construct
  misc_feature 1..101: note = Synthetic
  source 1..101: mol_type = other RNA
cctgggttggaaggagggggtatagttgtagctccctgaaaccgttgctacaataaggccgtcgaaagatgtgccgcaacgctctgccttctggcatcgtt

SEQ ID NO: 275 - RNA, 101 nt, synthetic construct
  misc_feature 1..101: note = Synthetic
  source 1..101: mol_type = other RNA
ctgggttggaaggagggggtataagttgtagctccctgaaaccgttgctacaataaggccgtcgaaagatgtgccgcaacgctctgccttctggcatcgtt

SEQ ID NO: 276 - RNA, 101 nt, synthetic construct
  misc_feature 1..101: note = Synthetic
  source 1..101: mol_type = other RNA
ggtataaaagccccttcaccaggagttgtagctccctgaaaccgttgctacaataaggccgtcgaaagatgtgccgcaacgctctgccttctggcatcgtt

SEQ ID NO: 277 - RNA, 101 nt, synthetic construct
  misc_feature 1..101: note = Synthetic
  source 1..101: mol_type = other RNA
tttgcttgtaaaacattgaacggtgttgtagctccctgaaaccgttgctacaataaggccgtcgaaagatgtgccgcaacgctctgccttctggcatcgtt

SEQ ID NO: 278 - RNA, 101 nt, synthetic construct
  misc_feature 1..101: note = Synthetic
  source 1..101: mol_type = other RNA
cttcaccaggagaagccgtcacacgttgtagctccctgaaaccgttgctacaataaggccgtcgaaagatgtgccgcaacgctctgccttctggcatcgtt

SEQ ID NO: 279 - RNA, 101 nt, synthetic construct
  misc_feature 1..101: note = Synthetic
  source 1..101: mol_type = other RNA
gagaagccgtcacacagatccacagttgtagctccctgaaaccgttgctacaataaggccgtcgaaagatgtgccgcaacgctctgccttctggcatcgtt

SEQ ID NO: 280 - RNA, 101 nt, synthetic construct
  misc_feature 1..101: note = Synthetic
  source 1..101: mol_type = other RNA
tgcccagggtgctggagaatccaagttgtagctccctgaaaccgttgctacaataaggccgtcgaaagatgtgccgcaacgctctgccttctggcatcgtt

SEQ ID NO: 281 - RNA, 101 nt, synthetic construct
  misc_feature 1..101: note = Synthetic
  source 1..101: mol_type = other RNA
gacgtggctgtaaaagtgttcaaagttgtagctccctgaaaccgttgctacaataaggccgtcgaaagatgtgccgcaacgctctgccttctggcatcgtt

SEQ ID NO: 282 - RNA, 101 nt, synthetic construct
  misc_feature 1..101: note = Synthetic
  source 1..101: mol_type = other RNA
caaaaagacctctgagggatcctggttgtagctccctgaaaccgttgctacaataaggccgtcgaaagatgtgccgcaacgctctgccttctggcatcgtt

SEQ ID NO: 283 - RNA, 101 nt, synthetic construct
  misc_feature 1..101: note = Synthetic
  source 1..101: mol_type = other RNA
aaaaagacctctgagggatcctgggttgtagctccctgaaaccgttgctacaataaggccgtcgaaagatgtgccgcaacgctctgccttctggcatcgtt

SEQ ID NO: 284 - RNA, 101 nt, synthetic construct
  misc_feature 1..101: note = Synthetic
  source 1..101: mol_type = other RNA
ctctggacttgtgtgccctccagggttgtagctccctgaaaccgttgctacaataaggccgtcgaaagatgtgccgcaacgctctgccttctggcatcgtt

SEQ ID NO: 285 - RNA, 101 nt, synthetic construct
  misc_feature 1..101: note = Synthetic
  source 1..101: mol_type = other RNA
tccttccaacccaggctgctgatcgttgtagctccctgaaaccgttgctacaataaggccgtcgaaagatgtgccgcaacgctctgccttctggcatcgtt

SEQ ID NO: 286 - RNA, 101 nt, synthetic construct
  misc_feature 1..101: note = Synthetic
  source 1..101: mol_type = other RNA
cccctccttccaacccaggctgctgttgtagctccctgaaaccgttgctacaataaggccgtcgaaagatgtgccgcaacgctctgccttctggcatcgtt

SEQ ID NO: 287 - RNA, 101 nt, synthetic construct
  misc_feature 1..101: note = Synthetic
  source 1..101: mol_type = other RNA
agcaacccccagaattgagagactgttgtagctccctgaaaccgttgctacaataaggccgtcgaaagatgtgccgcaacgctctgccttctggcatcgtt

SEQ ID NO: 288 - RNA, 101 nt, synthetic construct
  misc_feature 1..101: note = Synthetic
  source 1..101: mol_type = other RNA
accaggatcttgccaaagcagtaggttgtagctccctgaaaccgttgctacaataaggccgtcgaaagatgtgccgcaacgctctgccttctggcatcgtt

SEQ ID NO: 289 - RNA, 101 nt, synthetic construct
  misc_feature 1..101: note = Synthetic
  source 1..101: mol_type = other RNA
ttgccaaagcagtagcatcccattgttgtagctccctgaaaccgttgctacaataaggccgtcgaaagatgtgccgcaacgctctgccttctggcatcgtt

SEQ ID NO: 290 - RNA, 101 nt, synthetic construct; identical to SEQ ID NO: 214
  misc_feature 1..101: note = Synthetic
  source 1..101: mol_type = other RNA

SEQ ID NO: 291 - RNA, 101 nt, synthetic construct; identical to SEQ ID NO: 278
  misc_feature 1..101: note = Synthetic
  source 1..101: mol_type = other RNA

SEQ ID NO: 292 - RNA, 104 nt, synthetic construct
  misc_feature 1..104: note = Synthetic
  source 1..104: mol_type = other RNA
atcacgatgcctttatagggcaccgttttagagctagaaatagcaagttaaaataaggctagtccgttatcaacttgaaaaagtggcaccgagtcggtgctttt

SEQ ID NO: 293 - RNA, 104 nt, synthetic construct
  misc_feature 1..104: note = Synthetic
  source 1..104: mol_type = other RNA
agtgatatcacgatgcctttataggttttagagctagaaatagcaagttaaaataaggctagtccgttatcaacttgaaaaagtggcaccgagtcggtgctttt

SEQ ID NO: 294 - RNA, 99 nt, synthetic construct
  misc_feature 1..99: note = Synthetic
  source 1..99: mol_type = other RNA
ggtgcaaggaatgagaaccgttttagagctagaaatagcaagttaaaataaggctagtccgttatcaacttgaaaaagtggcaccgagtcggtgctttt

SEQ ID NO: 295 - RNA, 105 nt, synthetic construct
  misc_feature 1..105: note = Synthetic
  misc_feature 1..105: note = See specification as filed for detailed description of substitutions and modifications
  source 1..105: mol_type = other RNA
ccaagtgtcttccagtacgatttggttgtagctcccttcgaaagaccgttgctacaataaggccgtcgaaagatgtgccgcaacgctctgccttctggcatcgtt

SEQ ID NO: 296-300 - skipped (5 entries)

SEQ ID NO: 301 - RNA, 107 nt, synthetic construct; identical to SEQ ID NO: 101
  misc_feature 1..107: note = Synthetic
  misc_feature 1..107: note = See specification as filed for detailed description of substitutions and modifications
  source 1..107: mol_type = other RNA

SEQ ID NO: 302 - RNA, 107 nt, synthetic construct; identical to SEQ ID NO: 102
  misc_feature 1..107: note = Synthetic
  misc_feature 1..107: note = See specification as filed for detailed description of substitutions and modifications
  source 1..107: mol_type = other RNA

SEQ ID NO: 303 - RNA, 105 nt, synthetic construct; identical to SEQ ID NO: 103
  misc_feature 1..105: note = Synthetic
  misc_feature 1..105: note = See specification as filed for detailed description of substitutions and modifications
  source 1..105: mol_type = other RNA

SEQ ID NO: 304 - RNA, 107 nt, synthetic construct; identical to SEQ ID NO: 101
  misc_feature 1..107: note = Synthetic
  source 1..107: mol_type = other RNA

SEQ ID NO: 305 - RNA, 107 nt, synthetic construct; identical to SEQ ID NO: 101
  misc_feature 1..107: note = Synthetic
  misc_feature 1..107: note = See specification as filed for detailed description of substitutions and modifications
  source 1..107: mol_type = other RNA

SEQ ID NO: 306 - RNA, 107 nt, synthetic construct; identical to SEQ ID NO: 101
  misc_feature 1..107: note = Synthetic
  misc_feature 1..107: note = See specification as filed for detailed description of substitutions and modifications
  source 1..107: mol_type = other RNA

SEQ ID NO: 307 - RNA, 107 nt, synthetic construct; identical to SEQ ID NO: 101
  misc_feature 1..107: note = Synthetic
  misc_feature 1..107: note = See specification as filed for detailed description of substitutions and modifications
  source 1..107: mol_type = other RNA

SEQ ID NO: 308 - RNA, 107 nt, synthetic construct; identical to SEQ ID NO: 101
  modified_base 29: mod_base = OTHER; note = thymine
  modified_base 37: mod_base = OTHER; note = thymine
  modified_base 47: mod_base = OTHER; note = thymine
  misc_feature 1..107: note = Synthetic
  misc_feature 1..107: note = See specification as filed for detailed description of substitutions and modifications
  source 1..107: mol_type = other RNA

SEQ ID NO: 309 - RNA, 107 nt, synthetic construct; identical to SEQ ID NO: 101
  misc_feature 1..107: note = Synthetic
  misc_feature 1..107: note = See specification as filed for detailed description of substitutions and modifications
  source 1..107: mol_type = other RNA

SEQ ID NO: 310 - RNA, 107 nt, synthetic construct; identical to SEQ ID NO: 101
  misc_feature 1..107: note = Synthetic
  misc_feature 1..107: note = See specification as filed for detailed description of substitutions and modifications
  source 1..107: mol_type = other RNA

SEQ ID NO: 311 - RNA, 107 nt, synthetic construct; identical to SEQ ID NO: 101
  misc_feature 1..107: note = Synthetic
  misc_feature 1..107: note = See specification as filed for detailed description of substitutions and modifications
  source 1..107: mol_type = other RNA

SEQ ID NO: 312 - RNA, 107 nt, synthetic construct; identical to SEQ ID NO: 101
  misc_feature 1..107: note = Synthetic
  misc_feature 1..107: note = See specification as filed for detailed description of substitutions and modifications
  source 1..107: mol_type = other RNA

SEQ ID NO: 313 - RNA, 107 nt, synthetic construct; identical to SEQ ID NO: 101
  misc_feature 1..107: note = Synthetic
  misc_feature 1..107: note = See specification as filed for detailed description of substitutions and modifications
  source 1..107: mol_type = other RNA

SEQ ID NO: 314 - RNA, 107 nt, synthetic construct; identical to SEQ ID NO: 101
  misc_feature 1..107: note = Synthetic
  misc_feature 1..107: note = See specification as filed for detailed description of substitutions and modifications
  source 1..107: mol_type = other RNA

SEQ ID NO: 315 - RNA, 107 nt, synthetic construct; identical to SEQ ID NO: 101
  misc_feature 1..107: note = Synthetic
  misc_feature 1..107: note = See specification as filed for detailed description of substitutions and modifications
  source 1..107: mol_type = other RNA

SEQ ID NO: 316 - RNA, 107 nt, synthetic construct; identical to SEQ ID NO: 116
  misc_feature 1..107: note = Synthetic
  misc_feature 1..107: note = See specification as filed for detailed description of substitutions and modifications
  source 1..107: mol_type = other RNA

SEQ ID NO: 317 - RNA, 103 nt, synthetic construct; identical to SEQ ID NO: 117
  misc_feature 1..103: note = Synthetic
  misc_feature 1..103: note = See specification as filed for detailed description of substitutions and modifications
  source 1..103: mol_type = other RNA

SEQ ID NO: 318 - RNA, 105 nt, synthetic construct; identical to SEQ ID NO: 118
  misc_feature 1..105: note = Synthetic
  source 1..105: mol_type = other RNA

SEQ ID NO: 319 - RNA, 105 nt, synthetic construct; identical to SEQ ID NO: 118
  misc_feature 1..105: note = Synthetic
  misc_feature 1..105: note = See specification as filed for detailed description of substitutions and modifications
  source 1..105: mol_type = other RNA

SEQ ID NO: 320 - RNA, 105 nt, synthetic construct; identical to SEQ ID NO: 118
  misc_feature 1..105: note = Synthetic
  misc_feature 1..105: note = See specification as filed for detailed description of substitutions and modifications
  source 1..105: mol_type = other RNA

SEQ ID NO: 321 - RNA, 105 nt, synthetic construct; identical to SEQ ID NO: 118
  misc_feature 1..105: note = Synthetic
  misc_feature 1..105: note = See specification as filed for detailed description of substitutions and modifications
  source 1..105: mol_type = other RNA

SEQ ID NO: 322 - RNA, 105 nt, synthetic construct; identical to SEQ ID NO: 118
  modified_base 29: mod_base = OTHER; note = thymine
  modified_base 37: mod_base = OTHER; note = thymine
  modified_base 45: mod_base = OTHER; note = thymine
  misc_feature 1..105: note = Synthetic
  misc_feature 1..105: note = See specification as filed for detailed description of substitutions and modifications
  source 1..105: mol_type = other RNA

SEQ ID NO: 323 - RNA, 105 nt, synthetic construct; identical to SEQ ID NO: 118
  misc_feature 1..105: note = Synthetic
  misc_feature 1..105: note = See specification as filed for detailed description of substitutions and modifications
  source 1..105: mol_type = other RNA

SEQ ID NO: 324 - RNA, 105 nt, synthetic construct; identical to SEQ ID NO: 118
  misc_feature 1..105: note = Synthetic
  misc_feature 1..105: note = See specification as filed for detailed description of substitutions and modifications
  source 1..105: mol_type = other RNA

SEQ ID NO: 325 - RNA, 105 nt, synthetic construct; identical to SEQ ID NO: 118
  misc_feature 1..105: note = Synthetic
  misc_feature 1..105: note = See specification as filed for detailed description of substitutions and modifications
  source 1..105: mol_type = other RNA

SEQ ID NO: 326 - RNA, 105 nt, synthetic construct; identical to SEQ ID NO: 126
  misc_feature 1..105: note = Synthetic
  misc_feature 1..105: note = See specification as filed for detailed description of substitutions and modifications
  source 1..105: mol_type = other RNA

SEQ ID NO: 327 - RNA, 101 nt, synthetic construct; identical to SEQ ID NO: 127
  misc_feature 1..101: note = Synthetic
  misc_feature 1..101: note = See specification as filed for detailed description of substitutions and modifications
  source 1..101: mol_type = other RNA

SEQ ID NO: 328 - RNA, 105 nt, synthetic construct; identical to SEQ ID NO: 118
  misc_feature 1..105: note = Synthetic
  misc_feature 1..105: note = See specification as filed for detailed description of substitutions and modifications
  source 1..105: mol_type = other RNA

SEQ ID NO: 329 - RNA, 105 nt, synthetic construct; identical to SEQ ID NO: 118
  misc_feature 1..105: note = Synthetic
  misc_feature 1..105: note = See specification as filed for detailed description of substitutions and modifications
  source 1..105: mol_type = other RNA

SEQ ID NO: 330 - RNA, 105 nt, synthetic construct; identical to SEQ ID NO: 118
  misc_feature 1..105: note = Synthetic
  misc_feature 1..105: note = See specification as filed for detailed description of substitutions and modifications
  source 1..105: mol_type = other RNA

SEQ ID NO: 331 - RNA, 105 nt, synthetic construct; identical to SEQ ID NO: 118
  misc_feature 1..105: note = Synthetic
  misc_feature 1..105: note = See specification as filed for detailed description of substitutions and modifications
  source 1..105: mol_type = other RNA

SEQ ID NO: 332 - RNA, 105 nt, synthetic construct; identical to SEQ ID NO: 126
  misc_feature 1..105: note = Synthetic
  misc_feature 1..105: note = See specification as filed for detailed description of substitutions and modifications
  source 1..105: mol_type = other RNA

SEQ ID NO: 333 - RNA, 101 nt, synthetic construct; identical to SEQ ID NO: 127
  misc_feature 1..101: note = Synthetic
  misc_feature 1..101: note = See specification as filed for detailed description of substitutions and modifications
  source 1..101: mol_type = other RNA

SEQ ID NO: 334 - RNA, 105 nt, synthetic construct; identical to SEQ ID NO: 118
  misc_feature 1..105: note = Synthetic
  misc_feature 1..105: note = See specification as filed for detailed description of substitutions and modifications
  source 1..105: mol_type = other RNA

SEQ ID NO: 335 - RNA, 105 nt, synthetic construct; identical to SEQ ID NO: 118
  misc_feature 1..105: note = Synthetic
  misc_feature 1..105: note = See specification as filed for detailed description of substitutions and modifications
  source 1..105: mol_type = other RNA

SEQ ID NO: 336 - RNA, 105 nt, synthetic construct; identical to SEQ ID NO: 118
  misc_feature 1..105: note = Synthetic
  misc_feature 1..105: note = See specification as filed for detailed description of substitutions and modifications
  source 1..105: mol_type = other RNA

SEQ ID NO: 337 - RNA, 105 nt, synthetic construct; identical to SEQ ID NO: 118
  misc_feature 1..105: note = Synthetic
  misc_feature 1..105: note = See specification as filed for detailed description of substitutions and modifications
  source 1..105: mol_type = other RNA

SEQ ID NO: 338 - RNA, 105 nt, synthetic construct; identical to SEQ ID NO: 118
  misc_feature 1..105: note = Synthetic
  misc_feature 1..105: note = See specification as filed for detailed description of substitutions and modifications
  source 1..105: mol_type = other RNA

SEQ ID NO: 339 - RNA, 105 nt, synthetic construct; identical to SEQ ID NO: 126
  misc_feature 1..105: note = Synthetic
  misc_feature 1..105: note = See specification as filed for detailed description of substitutions and modifications
  source 1..105: mol_type = other RNA

SEQ ID NO: 340 - RNA, 101 nt, synthetic construct; identical to SEQ ID NO: 127
  misc_feature 1..101: note = Synthetic
  misc_feature 1..101: note = See specification as filed for detailed description of substitutions and modifications
  source 1..101: mol_type = other RNA

SEQ ID NO: 341 - RNA, 105 nt, synthetic construct; identical to SEQ ID NO: 118
  misc_feature 1..105: note = Synthetic
  misc_feature 1..105: note = See specification as filed for detailed description of substitutions and modifications
  source 1..105: mol_type = other RNA

SEQ ID NO: 342 - RNA, 105 nt, synthetic construct; identical to SEQ ID NO: 118
  misc_feature 1..105: note = Synthetic
  misc_feature 1..105: note = See specification as filed for detailed description of substitutions and modifications
  source 1..105: mol_type = other RNA

SEQ ID NO: 343 - RNA, 105 nt, synthetic construct; identical to SEQ ID NO: 118
  misc_feature 1..105: note = Synthetic
  misc_feature 1..105: note = See specification as filed for detailed description of substitutions and modifications
  source 1..105: mol_type = other RNA

SEQ ID NO: 344 - RNA, 105 nt, synthetic construct; identical to SEQ ID NO: 118
  misc_feature 1..105: note = Synthetic
  misc_feature 1..105: note = See specification as filed for detailed description of substitutions and modifications
  source 1..105: mol_type = other RNA

SEQ ID NO: 345 - RNA, 105 nt, synthetic construct; identical to SEQ ID NO: 126
  misc_feature 1..105: note = Synthetic
  misc_feature 1..105: note = See specification as filed for detailed description of substitutions and modifications
  source 1..105: mol_type = other RNA

SEQ ID NO: 346 - RNA, 101 nt, synthetic construct; identical to SEQ ID NO: 127
  misc_feature 1..101: note = Synthetic
  misc_feature 1..101: note = See specification as filed for detailed description of substitutions and modifications
  source 1..101: mol_type = other RNA

SEQ ID NO: 347 - RNA, 107 nt, synthetic construct; identical to SEQ ID NO: 147
  misc_feature 1..107: note = Synthetic
  misc_feature 1..107: note = See specification as filed for detailed description of substitutions and modifications
  source 1..107: mol_type = other RNA

SEQ ID NO: 348 - RNA, 101 nt, synthetic construct; identical to SEQ ID NO: 127
  misc_feature 1..101: note = Synthetic
  misc_feature 1..101: note = See specification as filed for detailed description of substitutions and modifications
  source 1..101: mol_type = other RNA

SEQ ID NO: 349 - RNA, 101 nt, synthetic construct; identical to SEQ ID NO: 127
  misc_feature 1..101: note = Synthetic
  misc_feature 1..101: note = See specification as filed for detailed description of substitutions and modifications
  source 1..101: mol_type = other RNA

SEQ ID NO: 350 - RNA, 101 nt, synthetic construct; identical to SEQ ID NO: 127
  misc_feature 1..101: note = Synthetic
  misc_feature 1..101: note = See specification as filed for detailed description of substitutions and modifications
  source 1..101: mol_type = other RNA

SEQ ID NO: 351 - RNA, 101 nt, synthetic construct; identical to SEQ ID NO: 127
  misc_feature 1..101: note = Synthetic
  misc_feature 1..101: note = See specification as filed for detailed description of substitutions and modifications
  source 1..101: mol_type = other RNA

SEQ ID NO: 352 - RNA, 101 nt, synthetic construct; identical to SEQ ID NO: 127
  misc_feature 1..101: note = Synthetic
  misc_feature 1..101: note = See specification as filed for detailed description of substitutions and modifications
  source 1..101: mol_type = other RNA

SEQ ID NO: 353 - RNA, 101 nt, synthetic construct; identical to SEQ ID NO: 127
  misc_feature 1..101: note = Synthetic
  misc_feature 1..101: note = See specification as filed for detailed description of substitutions and modifications
  source 1..101: mol_type = other RNA

SEQ ID NO: 354 - RNA, 101 nt, synthetic construct; identical to SEQ ID NO: 127
  misc_feature 1..101: note = Synthetic
  misc_feature 1..101: note = See specification as filed for detailed description of substitutions and modifications
  source 1..101: mol_type = other RNA

SEQ ID NO: 355 - RNA, 101 nt, synthetic construct; identical to SEQ ID NO: 127
  misc_feature 1..101: note = Synthetic
  misc_feature 1..101: note = See specification as filed for detailed description of substitutions and modifications
  source 1..101: mol_type = other RNA

SEQ ID NO: 356 - RNA, 101 nt, synthetic construct; identical to SEQ ID NO: 127
  misc_feature 1..101: note = Synthetic
  misc_feature 1..101: note = See specification as filed for detailed description of substitutions and modifications
  source 1..101: mol_type = other RNA

SEQ ID NO: 357 - RNA, 101 nt, synthetic construct; identical to SEQ ID NO: 127
  misc_feature 1..101: note = Synthetic
  misc_feature 1..101: note = See specification as filed for detailed description of substitutions and modifications
  source 1..101: mol_type = other RNA

SEQ ID NO: 358 - RNA, 101 nt, synthetic construct; identical to SEQ ID NO: 127
  misc_feature 1..101: note = Synthetic
  misc_feature 1..101: note = See specification as filed for detailed description of substitutions and modifications
  source 1..101: mol_type = other RNA

SEQ ID NO: 359 - RNA, 101 nt, synthetic construct; identical to SEQ ID NO: 127
  misc_feature 1..101: note = Synthetic
  misc_feature 1..101: note = See specification as filed for detailed description of substitutions and modifications
  source 1..101: mol_type = other RNA

SEQ ID NO: 360 - RNA, 101 nt, synthetic construct; identical to SEQ ID NO: 160
  misc_feature 1..101: note = Synthetic
  misc_feature 1..101: note = See specification as filed for detailed description of substitutions and modifications
  source 1..101: mol_type = other RNA

SEQ ID NO: 361 - RNA, 101 nt, synthetic construct; identical to SEQ ID NO: 127
  misc_feature 1..101: note = Synthetic
  misc_feature 1..101: note = See specification as filed for detailed description of substitutions and modifications
  source 1..101: mol_type = other RNA

SEQ ID NO: 362 - RNA, 101 nt, synthetic construct; identical to SEQ ID NO: 127
  misc_feature 1..101: note = Synthetic
  misc_feature 1..101: note = See specification as filed for detailed description of substitutions and modifications
  source 1..101: mol_type = other RNA

SEQ ID NO: 363 - RNA, 101 nt, synthetic construct; identical to SEQ ID NO: 127
  misc_feature 1..101: note = Synthetic
  misc_feature 1..101: note = See specification as filed for detailed description of substitutions and modifications
  source 1..101: mol_type = other RNA

SEQ ID NO: 364 - RNA, 101 nt, synthetic construct; identical to SEQ ID NO: 127
  misc_feature 1..101: note = Synthetic
  misc_feature 1..101: note = See specification as filed for detailed description of substitutions and modifications
  source 1..101: mol_type = other RNA

SEQ ID NO: 365 - RNA, 101 nt, synthetic construct; identical to SEQ ID NO: 127
  misc_feature 1..101: note = Synthetic
  misc_feature 1..101: note = See specification as filed for detailed description of substitutions and modifications
  source 1..101: mol_type = other RNA

SEQ ID NO: 366 - RNA, 101 nt, synthetic construct; identical to SEQ ID NO: 127
  misc_feature 1..101: note = Synthetic
  misc_feature 1..101: note = See specification as filed for detailed description of substitutions and modifications
  source 1..101: mol_type = other RNA

SEQ ID NO: 367 - RNA, 101 nt, synthetic construct; identical to SEQ ID NO: 127
  misc_feature 1..101: note = Synthetic
  misc_feature 1..101: note = See specification as filed for detailed description of substitutions and modifications
  source 1..101: mol_type = other RNA

SEQ ID NO: 368 - RNA, 101 nt, synthetic construct; identical to SEQ ID NO: 127
  misc_feature 1..101: note = Synthetic
  misc_feature 1..101: note = See specification as filed for detailed description of substitutions and modifications
  source 1..101: mol_type = other RNA

SEQ ID NO: 369 - RNA, 101 nt, synthetic construct; identical to SEQ ID NO: 127
  misc_feature 1..101: note = Synthetic
  misc_feature 1..101: note = See specification as filed for detailed description of substitutions and modifications
  source 1..101: mol_type = other RNA

SEQ ID NO: 370 - RNA, 101 nt, synthetic construct; identical to SEQ ID NO: 127
  misc_feature 1..101: note = Synthetic
  misc_feature 1..101: note = See specification as filed for detailed description of substitutions and modifications
  source 1..101: mol_type = other RNA

SEQ ID NO: 371 - RNA, 101 nt, synthetic construct; identical to SEQ ID NO: 127
  misc_feature 1..101: note = Synthetic
  misc_feature 1..101: note = See specification as filed for detailed description of substitutions and modifications
  source 1..101: mol_type = other RNA

SEQ ID NO: 372 - RNA, 101 nt, synthetic construct; identical to SEQ ID NO: 127
  misc_feature 1..101: note = Synthetic
  misc_feature 1..101: note = See specification as filed for detailed description of substitutions and modifications
  source 1..101: mol_type = other RNA

SEQ ID NO: 373 - RNA, 102 nt, synthetic construct; identical to SEQ ID NO: 173
  misc_feature 1..102: note = Synthetic
  misc_feature 1..102: note = See specification as filed for detailed description of substitutions and modifications
  source 1..102: mol_type = other RNA

SEQ ID NO: 374 - RNA, 103 nt, synthetic construct; identical to SEQ ID NO: 174
  misc_feature 1..103: note = Synthetic
  misc_feature 1..103: note = See specification as filed for detailed description of substitutions and modifications
  source 1..103: mol_type = other RNA

SEQ ID NO: 375 - RNA, 104 nt, synthetic construct; identical to SEQ ID NO: 175
  misc_feature 1..104: note = Synthetic
  misc_feature 1..104: note = See specification as filed for detailed description of substitutions and modifications
  source 1..104: mol_type = other RNA

SEQ ID NO: 376 - RNA, 105 nt, synthetic construct; identical to SEQ ID NO: 176
  misc_feature 1..105: note = Synthetic
  misc_feature 1..105: note = See specification as filed for detailed description of substitutions and modifications
  source 1..105: mol_type = other RNA

SEQ ID NO: 377 - RNA, 99 nt, synthetic construct; identical to SEQ ID NO: 177
  misc_feature 1..99: note = Synthetic
  misc_feature 1..99: note = See specification as filed for detailed description of substitutions and modifications
  source 1..99: mol_type = other RNA

SEQ ID NO: 378 - RNA, 97 nt, synthetic construct; identical to SEQ ID NO: 178
  misc_feature 1..97: note = Synthetic
  misc_feature 1..97: note = See specification as filed for detailed description of substitutions and modifications
  source 1..97: mol_type = other RNA

SEQ ID NO: 379 - RNA, 101 nt, synthetic construct; identical to SEQ ID NO: 127
  misc_feature 1..101: note = Synthetic
  misc_feature 1..101: note = See specification as filed for detailed description of substitutions and modifications
  source 1..101: mol_type = other RNA

SEQ ID NO: 380 - RNA, 101 nt, synthetic construct; identical to SEQ ID NO: 127
  misc_feature 1..101: note = Synthetic
  misc_feature 1..101: note = See specification as filed for detailed description of substitutions and modifications
  source 1..101: mol_type = other RNA

SEQ ID NO: 381 - RNA, 101 nt, synthetic construct; identical to SEQ ID NO: 160
  misc_feature 1..101: note = Synthetic
  misc_feature 1..101: note = See specification as filed for detailed description of substitutions and modifications
  source 1..101: mol_type = other RNA

SEQ ID NO: 382 - RNA, 101 nt, synthetic construct; identical to SEQ ID NO: 160
  misc_feature 1..101: note = Synthetic
  misc_feature 1..101: note = See specification as filed for detailed description of substitutions and modifications
  source 1..101: mol_type = other RNA

SEQ ID NO: 383 - RNA, 101 nt, synthetic construct; identical to SEQ ID NO: 127
  misc_feature 1..101: note = Synthetic
  misc_feature 1..101: note = See specification as filed for detailed description of substitutions and modifications
  source 1..101: mol_type = other RNA

SEQ ID NO: 384 - RNA, 101 nt, synthetic construct; identical to SEQ ID NO: 127
  misc_feature 1..101: note = Synthetic
  misc_feature 1..101: note = See specification as filed for detailed description of substitutions and modifications
  source 1..101: mol_type = other RNA

SEQ ID NO: 385 - RNA, 101 nt, synthetic construct; identical to SEQ ID NO: 127
  misc_feature 1..101: note = Synthetic
  misc_feature 1..101: note = See specification as filed for detailed description of substitutions and modifications
  source 1..101: mol_type = other RNA

SEQ ID NO: 386 - RNA, 101 nt, synthetic construct; identical to SEQ ID NO: 127
  misc_feature 1..101: note = Synthetic
  misc_feature 1..101: note = See specification as filed for detailed description of substitutions and modifications
  source 1..101: mol_type = other RNA

SEQ ID NO: 387 - RNA, 101 nt, synthetic construct; identical to SEQ ID NO: 127
  misc_feature 1..101: note = Synthetic
  misc_feature 1..101: note = See specification as filed for detailed description of substitutions and modifications
  source 1..101: mol_type = other RNA

SEQ ID NO: 388 - RNA, 103 nt, synthetic construct; identical to SEQ ID NO: 188
  misc_feature 1..103: note = Synthetic
  misc_feature 1..103: note = See specification as filed for detailed description of substitutions and modifications
  source 1..103: mol_type = other RNA

SEQ ID NO: 389 - RNA, 103 nt, synthetic construct; identical to SEQ ID NO: 189
  misc_feature 1..103: note = Synthetic
  misc_feature 1..103: note = See specification as filed for detailed description of substitutions and modifications
  source 1..103: mol_type = other RNA

SEQ ID NO: 390 - RNA, 105 nt, synthetic construct; identical to SEQ ID NO: 190
  misc_feature 1..105: note = Synthetic
  misc_feature 1..105: note = See specification as filed for detailed description of substitutions and modifications
  source 1..105: mol_type = other RNA

SEQ ID NO: 391 - RNA, 103 nt, synthetic construct; identical to SEQ ID NO: 188
  misc_feature 1..103: note = Synthetic
  misc_feature 1..103: note = See specification as filed for detailed description of substitutions and modifications
  source 1..103: mol_type = other RNA

SEQ ID NO: 392 - RNA, 103 nt, synthetic construct; identical to SEQ ID NO: 189
  misc_feature 1..103: note = Synthetic
  misc_feature 1..103: note = See specification as filed for detailed description of substitutions and modifications
  source 1..103: mol_type = other RNA

SEQ ID NO: 393 - RNA, 105 nt, synthetic construct; identical to SEQ ID NO: 190
  misc_feature 1..105: note = Synthetic
  misc_feature 1..105: note = See specification as filed for detailed description of substitutions and modifications
  source 1..105: mol_type = other RNA

SEQ ID NO: 394 - RNA, 107 nt, synthetic construct; identical to SEQ ID NO: 194
  misc_feature 1..107: note = Synthetic
  misc_feature 1..107: note = See specification as filed for detailed description of substitutions and modifications
  source 1..107: mol_type = other RNA

SEQ ID NO: 395 - RNA, 101 nt, synthetic construct; identical to SEQ ID NO: 195
  misc_feature 1..101: note = Synthetic
  misc_feature 1..101: note = See specification as filed for detailed description of substitutions and modifications
  source 1..101: mol_type = other RNA

SEQ ID NO: 396 - RNA, 101 nt, synthetic construct; identical to SEQ ID NO: 196
  misc_feature 1..101: note = Synthetic
  misc_feature 1..101: note = See specification as filed for detailed description of substitutions and modifications
  source 1..101: mol_type = other RNA

SEQ ID NO: 397 - RNA, 101 nt, synthetic construct; identical to SEQ ID NO: 197
  misc_feature 1..101: note = Synthetic
  misc_feature 1..101: note = See specification as filed for detailed description of substitutions and modifications
  source 1..101: mol_type = other RNA

SEQ ID NO: 398 - RNA, 101 nt, synthetic construct; identical to SEQ ID NO: 198
  misc_feature 1..101: note = Synthetic
  misc_feature 1..101: note = See specification as filed for detailed description of substitutions and modifications
  source 1..101: mol_type = other RNA

SEQ ID NO: 399 - RNA, 101 nt, synthetic construct; identical to SEQ ID NO: 199
  misc_feature 1..101: note = Synthetic
  misc_feature 1..101: note = See specification as filed for detailed description of substitutions and modifications
  source 1..101: mol_type = other RNA

SEQ ID NO: 400 - RNA, 101 nt, synthetic construct; identical to SEQ ID NO: 200
  misc_feature 1..101: note = Synthetic
  misc_feature 1..101: note = See specification as filed for detailed description of substitutions and modifications
  source 1..101: mol_type = other RNA

SEQ ID NO: 401 - RNA, 101 nt, synthetic construct; identical to SEQ ID NO: 201
  misc_feature 1..101: note = Synthetic
  misc_feature 1..101: note = See specification as filed for detailed description of substitutions and modifications
  source 1..101: mol_type = other RNA

SEQ ID NO: 402 - RNA, 101 nt, synthetic construct; identical to SEQ ID NO: 202
  misc_feature 1..101: note = Synthetic
  misc_feature 1..101: note = See specification as filed for detailed description of substitutions and modifications
  source 1..101: mol_type = other RNA

SEQ ID NO: 403 - RNA, 101 nt, synthetic construct; identical to SEQ ID NO: 203
  misc_feature 1..101: note = Synthetic
  misc_feature 1..101: note = See specification as filed for detailed description of substitutions and modifications
  source 1..101: mol_type = other RNA

SEQ ID NO: 404 - RNA, 101 nt, synthetic construct; identical to SEQ ID NO: 204
  misc_feature 1..101: note = Synthetic
  misc_feature 1..101: note = See specification as filed for detailed description of substitutions and modifications
  source 1..101: mol_type = other RNA

SEQ ID NO: 405 - RNA, 101 nt, synthetic construct; identical to SEQ ID NO: 205
  misc_feature 1..101: note = Synthetic
  misc_feature 1..101: note = See specification as filed for detailed description of substitutions and modifications
  source 1..101: mol_type = other RNA

SEQ ID NO: 406 - RNA, 101 nt, synthetic construct; identical to SEQ ID NO: 206
  misc_feature 1..101: note = Synthetic
  misc_feature 1..101: note = See specification as filed for detailed description of substitutions and modifications
  source 1..101: mol_type = other RNA

SEQ ID NO: 407 - RNA, 101 nt, synthetic construct; identical to SEQ ID NO: 207
  misc_feature 1..101: note = Synthetic
  misc_feature 1..101: note = See specification as filed for detailed description of substitutions and modifications
  source 1..101: mol_type = other RNA

SEQ ID NO: 408 - RNA, 101 nt, synthetic construct; identical to SEQ ID NO: 208
  misc_feature 1..101: note = Synthetic
  misc_feature 1..101: note = See specification as filed for detailed description of substitutions and modifications
  source 1..101: mol_type = other RNA

SEQ ID NO: 409 - RNA, 101 nt, synthetic construct; identical to SEQ ID NO: 209
  misc_feature 1..101: note = Synthetic
  misc_feature 1..101: note = See specification as filed for detailed description of substitutions and modifications
  source 1..101: mol_type = other RNA

SEQ ID NO: 410 - RNA, 101 nt, synthetic construct; identical to SEQ ID NO: 210
  misc_feature 1..101: note = Synthetic
  misc_feature 1..101: note = See specification as filed for detailed description of substitutions and modifications
  source 1..101: mol_type = other RNA

SEQ ID NO: 411 - RNA, 101 nt, synthetic construct; identical to SEQ ID NO: 211
  misc_feature 1..101: note = Synthetic
  misc_feature 1..101: note = See specification as filed for detailed description of substitutions and modifications
  source 1..101: mol_type = other RNA

SEQ ID NO: 412 - RNA, 101 nt, synthetic construct; identical to SEQ ID NO: 212
  misc_feature 1..101: note = Synthetic
  misc_feature 1..101: note = See specification as filed for detailed description of substitutions and modifications
  source 1..101: mol_type = other RNA

SEQ ID NO: 413 - RNA, 101 nt, synthetic construct; identical to SEQ ID NO: 213
  misc_feature 1..101: note = Synthetic
  misc_feature 1..101: note = See specification as filed for detailed description of substitutions and modifications
  source 1..101: mol_type = other RNA

SEQ ID NO: 414 - RNA, 101 nt, synthetic construct; identical to SEQ ID NO: 214
  misc_feature 1..101: note = Synthetic
  source 1..101: mol_type = other RNA

SEQ ID NO: 415 - RNA, 101 nt, synthetic construct; identical to SEQ ID NO: 215
  misc_feature 1..101: note = Synthetic
  misc_feature 1..101: note = See specification as filed for detailed description of substitutions and modifications
  source 1..101: mol_type = other RNA

SEQ ID NO: 416 - RNA, 101 nt, synthetic construct; identical to SEQ ID NO: 216
  misc_feature 1..101: note = Synthetic
  misc_feature 1..101: note = See specification as filed for detailed description of substitutions and modifications
  source 1..101: mol_type = other RNA

SEQ ID NO: 417 - RNA, 101 nt, synthetic construct; identical to SEQ ID NO: 217
  misc_feature 1..101: note = Synthetic
  misc_feature 1..101: note = See specification as filed for detailed description of substitutions and modifications
  source 1..101: mol_type = other RNA

SEQ ID NO: 418 - RNA, 101 nt, synthetic construct; identical to SEQ ID NO: 218
  misc_feature 1..101: note = Synthetic
  misc_feature 1..101: note = See specification as filed for detailed description of substitutions and modifications
  source 1..101: mol_type = other RNA

SEQ ID NO: 419 - RNA, 101 nt, synthetic construct; identical to SEQ ID NO: 219
  misc_feature 1..101: note = Synthetic
  misc_feature 1..101: note = See specification as filed for detailed description of substitutions and modifications
  source 1..101: mol_type = other RNA

SEQ ID NO: 420 - RNA, 101 nt, synthetic construct; identical to SEQ ID NO: 220
  misc_feature 1..101: note = Synthetic
  misc_feature 1..101: note = See specification as filed for detailed description of substitutions and modifications
  source 1..101: mol_type = other RNA

SEQ ID NO: 421 - RNA, 101 nt, synthetic construct; identical to SEQ ID NO: 221
  misc_feature 1..101: note = Synthetic
  misc_feature 1..101: note = See specification as filed for detailed description of substitutions and modifications
  source 1..101: mol_type = other RNA

SEQ ID NO: 422 - RNA, 101 nt, synthetic construct; identical to SEQ ID NO: 222
  misc_feature 1..101: note = Synthetic
  misc_feature 1..101: note = See specification as filed for detailed description of substitutions and modifications
  source 1..101: mol_type = other RNA

SEQ ID NO: 423 - RNA, 101 nt, synthetic construct; identical to SEQ ID NO: 223
  misc_feature 1..101: note = Synthetic
  misc_feature 1..101: note = See specification as filed for detailed description of substitutions and modifications
  source 1..101: mol_type = other RNA

SEQ ID NO: 424 - RNA, 101 nt, synthetic construct; identical to SEQ ID NO: 224
  misc_feature 1..101: note = Synthetic
  misc_feature 1..101: note = See specification as filed for detailed description of substitutions and modifications
  source 1..101: mol_type = other RNA

SEQ ID NO: 425 - RNA, 101 nt, synthetic construct; identical to SEQ ID NO: 225
  misc_feature 1..101: note = Synthetic
  misc_feature 1..101: note = See specification as filed for detailed description of substitutions and modifications
  source 1..101: mol_type = other RNA

SEQ ID NO: 426 - RNA, 101 nt, synthetic construct; identical to SEQ ID NO: 226
  misc_feature 1..101: note = Synthetic
  misc_feature 1..101: note = See specification as filed for detailed description of substitutions and modifications
  source 1..101: mol_type = other RNA

SEQ ID NO: 427 - RNA, 101 nt, synthetic construct; identical to SEQ ID NO: 227
  misc_feature 1..101: note = Synthetic
  misc_feature 1..101: note = See specification as filed for detailed description of substitutions and modifications
  source 1..101: mol_type = other RNA

SEQ ID NO: 428 - RNA, 101 nt, synthetic construct; identical to SEQ ID NO: 228
  misc_feature 1..101: note = Synthetic
  misc_feature 1..101: note = See specification as filed for detailed description of substitutions and modifications
  source 1..101: mol_type = other RNA

SEQ ID NO: 429 - RNA, 101 nt, synthetic construct; identical to SEQ ID NO: 229
  misc_feature 1..101: note = Synthetic
  misc_feature 1..101: note = See specification as filed for detailed description of substitutions and modifications
  source 1..101: mol_type = other RNA

SEQ ID NO: 430 - RNA, 101 nt, synthetic construct; identical to SEQ ID NO: 230
  misc_feature 1..101: note = Synthetic
  misc_feature 1..101: note = See specification as filed for detailed description of substitutions and modifications
  source 1..101: mol_type = other RNA

SEQ ID NO: 431 - RNA, 101 nt, synthetic construct; identical to SEQ ID NO: 231
  misc_feature 1..101: note = Synthetic
  misc_feature 1..101: note = See specification as filed for detailed description of substitutions and modifications
  source 1..101: mol_type = other RNA

SEQ ID NO: 432 - RNA, 101 nt, synthetic construct; identical to SEQ ID NO: 232
  misc_feature 1..101: note = Synthetic
  misc_feature 1..101: note = See specification as filed for detailed description of substitutions and modifications
  source 1..101: mol_type = other RNA

SEQ ID NO: 433 - RNA, 101 nt, synthetic construct; identical to SEQ ID NO: 233
  misc_feature 1..101: note = Synthetic
  misc_feature 1..101: note = See specification as filed for detailed description of substitutions and modifications
  source 1..101: mol_type = other RNA

SEQ ID NO: 434 - RNA, 101 nt, synthetic construct; identical to SEQ ID NO: 234
  misc_feature 1..101: note = Synthetic
  misc_feature 1..101: note = See specification as filed for detailed description of substitutions and modifications
  source 1..101: mol_type = other RNA

SEQ ID NO: 435 - RNA, 101 nt, synthetic construct; identical to SEQ ID NO: 235
  misc_feature 1..101: note = Synthetic
  misc_feature 1..101: note = See specification as filed for detailed description of substitutions and modifications
  source 1..101: mol_type = other RNA

SEQ ID NO: 436 - RNA, 101 nt, synthetic construct; identical to SEQ ID NO: 236
  misc_feature 1..101: note = Synthetic
  misc_feature 1..101: note = See specification as filed for detailed description of substitutions and modifications
  source 1..101: mol_type = other RNA

SEQ ID NO: 437 - RNA, 101 nt, synthetic construct; identical to SEQ ID NO: 237
  misc_feature 1..101: note = Synthetic
  misc_feature 1..101: note = See specification as filed for detailed description of substitutions and modifications
  source 1..101: mol_type = other RNA

SEQ ID NO: 438 - RNA, 101 nt, synthetic construct; identical to SEQ ID NO: 238
  misc_feature 1..101: note = Synthetic
  misc_feature 1..101: note = See specification as filed for detailed description of substitutions and modifications
  source 1..101: mol_type = other RNA

SEQ ID NO: 439 - RNA, 101 nt, synthetic construct; identical to SEQ ID NO: 239
  misc_feature 1..101: note = Synthetic
  misc_feature 1..101: note = See specification as filed for detailed description of substitutions and modifications
  source 1..101: mol_type = other RNA

SEQ ID NO: 440 - RNA, 101 nt, synthetic construct; identical to SEQ ID NO: 240
  misc_feature 1..101: note = Synthetic
  misc_feature 1..101: note = See specification as filed for detailed description of substitutions and modifications
  source 1..101: mol_type = other RNA

SEQ ID NO: 441 - RNA, 101 nt, synthetic construct; identical to SEQ ID NO: 241
  misc_feature 1..101: note = Synthetic
  misc_feature 1..101: note = See specification as filed for detailed description of substitutions and modifications
  source 1..101: mol_type = other RNA

SEQ ID NO: 442 - RNA, 101 nt, synthetic construct; identical to SEQ ID NO: 242
  misc_feature 1..101: note = Synthetic
  misc_feature 1..101: note = See specification as filed for detailed description of substitutions and modifications
  source 1..101: mol_type = other RNA

SEQ ID NO: 443 - RNA, 101 nt, synthetic construct; identical to SEQ ID NO: 243
  misc_feature 1..101: note = Synthetic
  misc_feature 1..101: note = See specification as filed for detailed description of substitutions and modifications
  source 1..101: mol_type = other RNA

SEQ ID NO: 444 - RNA, 101 nt, synthetic construct; identical to SEQ ID NO: 244
  misc_feature 1..101: note = Synthetic
  misc_feature 1..101: note = See specification as filed for detailed description of substitutions and modifications
  source 1..101: mol_type = other RNA

SEQ ID NO: 445 - RNA, 101 nt, synthetic construct; identical to SEQ ID NO: 245
  misc_feature 1..101: note = Synthetic
  misc_feature 1..101: note = See specification as filed for detailed description of substitutions and modifications
  source 1..101: mol_type = other RNA

SEQ ID NO: 446 - RNA, 101 nt, synthetic construct; identical to SEQ ID NO: 246
  misc_feature 1..101: note = Synthetic
  misc_feature 1..101: note = See specification as filed for detailed description of substitutions and modifications
  source 1..101: mol_type = other RNA

SEQ ID NO: 447 - RNA, 101 nt, synthetic construct; identical to SEQ ID NO: 247
  misc_feature 1..101: note = Synthetic
  misc_feature 1..101: note = See specification as filed for detailed description of substitutions and modifications
  source 1..101: mol_type = other RNA

SEQ ID NO: 448 - RNA, 101 nt, synthetic construct; identical to SEQ ID NO: 248
  misc_feature 1..101: note = Synthetic
  misc_feature 1..101: note = See specification as filed for detailed description of substitutions and modifications
  source 1..101: mol_type = other RNA

SEQ ID NO: 449 - RNA, 101 nt, synthetic construct; identical to SEQ ID NO: 249
  misc_feature 1..101: note = Synthetic
  misc_feature 1..101: note = See specification as filed for detailed description of substitutions and modifications
  source 1..101: mol_type = other RNA

SEQ ID NO: 450 - RNA, 101 nt, synthetic construct; identical to SEQ ID NO: 250
  misc_feature 1..101: note = Synthetic
  misc_feature 1..101: note = See specification as filed for detailed description of substitutions and modifications
  source 1..101: mol_type = other RNA

SEQ ID NO: 451 - RNA, 101 nt, synthetic construct; identical to SEQ ID NO: 251
  misc_feature 1..101: note = Synthetic
  misc_feature 1..101: note = See specification as filed for detailed description of substitutions and modifications
  source 1..101: mol_type = other RNA

SEQ ID NO: 452 - RNA, 101 nt, synthetic construct; identical to SEQ ID NO: 252
  misc_feature 1..101: note = Synthetic
  misc_feature 1..101: note = See specification as filed for detailed description of substitutions and modifications
  source 1..101: mol_type = other RNA

SEQ ID NO: 453 - RNA, 101 nt, synthetic construct; identical to SEQ ID NO: 253
  misc_feature 1..101: note = Synthetic
  misc_feature 1..101: note = See specification as filed for detailed description of substitutions and modifications
  source 1..101: mol_type = other RNA

SEQ ID NO: 454 - RNA, 101 nt, synthetic construct; identical to SEQ ID NO: 254
  misc_feature 1..101: note = Synthetic
  misc_feature 1..101: note = See specification as filed for detailed description of substitutions and modifications
  source 1..101: mol_type = other RNA

SEQ ID NO: 455 - RNA, 101 nt, synthetic construct; identical to SEQ ID NO: 255
  misc_feature 1..101: note = Synthetic
  misc_feature 1..101: note = See specification as filed for detailed description of substitutions and modifications
  source 1..101: mol_type = other RNA

SEQ ID NO: 456 - RNA, 101 nt, synthetic construct; identical to SEQ ID NO: 256
  misc_feature 1..101: note = Synthetic
  misc_feature 1..101: note = See specification as filed for detailed description of substitutions and modifications
  source 1..101: mol_type = other RNA

SEQ ID NO: 457 - RNA, 101 nt, synthetic construct; identical to SEQ ID NO: 257
  misc_feature 1..101: note = Synthetic
  misc_feature 1..101: note = See specification as filed for detailed description of substitutions and modifications
  source 1..101: mol_type = other RNA

SEQ ID NO: 458 - RNA, 101 nt, synthetic construct; identical to SEQ ID NO: 258
  misc_feature 1..101: note = Synthetic
  misc_feature 1..101: note = See specification as filed for detailed description of substitutions and modifications
  source 1..101: mol_type = other RNA

SEQ ID NO: 459 - RNA, 101 nt, synthetic construct; identical to SEQ ID NO: 259
  misc_feature 1..101: note = Synthetic
  misc_feature 1..101: note = See specification as filed for detailed description of substitutions and modifications
  source 1..101: mol_type = other RNA

SEQ ID NO: 460 - RNA, 101 nt, synthetic construct; identical to SEQ ID NO: 260
  misc_feature 1..101: note = Synthetic
  misc_feature 1..101: note = See specification as filed for detailed description of substitutions and modifications
  source 1..101: mol_type = other RNA

SEQ ID NO: 461 - RNA, 101 nt, synthetic construct; identical to SEQ ID NO: 261
  misc_feature 1..101: note = Synthetic
  misc_feature 1..101: note = See specification as filed for detailed description of substitutions and modifications
  source 1..101: mol_type = other RNA

SEQ ID NO: 462 - RNA, 101 nt, synthetic construct; identical to SEQ ID NO: 262
  misc_feature 1..101: note = Synthetic
  misc_feature 1..101: note = See specification as filed for detailed description of substitutions and modifications
  source 1..101: mol_type = other RNA

SEQ ID NO: 463 - RNA, 101 nt, synthetic construct; identical to SEQ ID NO: 263
  misc_feature 1..101: note = Synthetic
  misc_feature 1..101: note = See specification as filed for detailed description of substitutions and modifications
  source 1..101: mol_type = other RNA

SEQ ID NO: 464 - RNA, 101 nt, synthetic construct; identical to SEQ ID NO: 264
  misc_feature 1..101: note = Synthetic
  misc_feature 1..101: note = See specification as filed for detailed description of substitutions and modifications
  source 1..101: mol_type = other RNA

SEQ ID NO: 465 - RNA, 101 nt, synthetic construct; identical to SEQ ID NO: 265
  misc_feature 1..101: note = Synthetic
  misc_feature 1..101: note = See specification as filed for detailed description of substitutions and modifications
  source 1..101: mol_type = other RNA

SEQ ID NO: 466 - RNA, 101 nt, synthetic construct; identical to SEQ ID NO: 266
  misc_feature 1..101: note = Synthetic
  misc_feature 1..101: note = See specification as filed for detailed description of substitutions and modifications
  source 1..101: mol_type = other RNA

SEQ ID NO: 467 - RNA, 101 nt, synthetic construct; identical to SEQ ID NO: 267
  misc_feature 1..101: note = Synthetic
  misc_feature 1..101: note = See specification as filed for detailed description of substitutions and modifications
  source 1..101: mol_type = other RNA

SEQ ID NO: 468 - RNA, 101 nt, synthetic construct; identical to SEQ ID NO: 268
  misc_feature 1..101: note = Synthetic
  misc_feature 1..101: note = See specification as filed for detailed description of substitutions and modifications
  source 1..101: mol_type = other RNA

SEQ ID NO: 469 - RNA, 101 nt, synthetic construct; identical to SEQ ID NO: 269
  misc_feature 1..101: note = Synthetic
  misc_feature 1..101: note = See specification as filed for detailed description of substitutions and modifications
  source 1..101: mol_type = other RNA

SEQ ID NO: 470 - RNA, 101 nt, synthetic construct; identical to SEQ ID NO: 270
  misc_feature 1..101: note = Synthetic
  misc_feature 1..101: note = See specification as filed for detailed description of substitutions and modifications
  source 1..101: mol_type = other RNA

SEQ ID NO: 471 - RNA, 101 nt, synthetic construct; identical to SEQ ID NO: 271
  misc_feature 1..101: note = Synthetic
  misc_feature 1..101: note = See specification as filed for detailed description of substitutions and modifications
  source 1..101: mol_type = other RNA

SEQ ID NO: 472 - RNA, 101 nt, synthetic construct; identical to SEQ ID NO: 272
  misc_feature 1..101: note = Synthetic
  misc_feature 1..101: note = See specification as filed for detailed description of substitutions and modifications
  source 1..101: mol_type = other RNA

SEQ ID NO: 473 - RNA, 101 nt, synthetic construct; identical to SEQ ID NO: 273
  misc_feature 1..101: note = Synthetic
  misc_feature 1..101: note = See specification as filed for detailed description of substitutions and modifications
  source 1..101: mol_type = other RNA

SEQ ID NO: 474 - RNA, 101 nt, synthetic construct; identical to SEQ ID NO: 274
  misc_feature 1..101: note = Synthetic
  misc_feature 1..101: note = See specification as filed for detailed description of substitutions and modifications
  source 1..101: mol_type = other RNA

SEQ ID NO: 475 - RNA, 101 nt, synthetic construct; identical to SEQ ID NO: 275
  misc_feature 1..101: note = Synthetic
  misc_feature 1..101: note = See specification as filed for detailed description of substitutions and modifications
  source 1..101: mol_type = other RNA

SEQ ID NO: 476 - RNA, 101 nt, synthetic construct; identical to SEQ ID NO: 276
  misc_feature 1..101: note = Synthetic
  misc_feature 1..101: note = See specification as filed for detailed description of substitutions and modifications
  source 1..101: mol_type = other RNA

SEQ ID NO: 477 - RNA, 101 nt, synthetic construct; identical to SEQ ID NO: 277
  misc_feature 1..101: note = Synthetic
  misc_feature 1..101: note = See specification as filed for detailed description of substitutions and modifications
  source 1..101: mol_type = other RNA

SEQ ID NO: 478 - RNA, 101 nt, synthetic construct; identical to SEQ ID NO: 278
  misc_feature 1..101: note = Synthetic
  misc_feature 1..101: note = See specification as filed for detailed description of substitutions and modifications
  source 1..101: mol_type = other RNA

SEQ ID NO: 479 - RNA, 101 nt, synthetic construct; identical to SEQ ID NO: 279
  misc_feature 1..101: note = Synthetic
  misc_feature 1..101: note = See specification as filed for detailed description of substitutions and modifications
  source 1..101: mol_type = other RNA

SEQ ID NO: 480 - RNA, 101 nt, synthetic construct; identical to SEQ ID NO: 280
  misc_feature 1..101: note = Synthetic
  misc_feature 1..101: note = See specification as filed for detailed description of substitutions and modifications
  source 1..101: mol_type = other RNA

SEQ ID NO: 481 - RNA, 101 nt, synthetic construct; identical to SEQ ID NO: 281
  misc_feature 1..101: note = Synthetic
  misc_feature 1..101: note = See specification as filed for detailed description of substitutions and modifications
  source 1..101: mol_type = other RNA

SEQ ID NO: 482 - RNA, 101 nt, synthetic construct; identical to SEQ ID NO: 282
  misc_feature 1..101: note = Synthetic
  misc_feature 1..101: note = See specification as filed for detailed description of substitutions and modifications
  source 1..101: mol_type = other RNA

SEQ ID NO: 483 - RNA, 101 nt, synthetic construct; identical to SEQ ID NO: 283
  misc_feature 1..101: note = Synthetic
  misc_feature 1..101: note = See specification as filed for detailed description of substitutions and modifications
  source 1..101: mol_type = other RNA

SEQ ID NO: 484 - RNA, 101 nt, synthetic construct; identical to SEQ ID NO: 284
  misc_feature 1..101: note = Synthetic
  misc_feature 1..101: note = See specification as filed for detailed description of substitutions and modifications
  source 1..101: mol_type = other RNA

SEQ ID NO: 485 - RNA, 101 nt, synthetic construct; identical to SEQ ID NO: 285
  misc_feature 1..101: note = Synthetic
  misc_feature 1..101: note = See specification as filed for detailed description of substitutions and modifications
  source 1..101: mol_type = other RNA

SEQ ID NO: 486 - RNA, 101 nt, synthetic construct; identical to SEQ ID NO: 286
  misc_feature 1..101: note = Synthetic
  misc_feature 1..101: note = See specification as filed for detailed description of substitutions and modifications
  source 1..101: mol_type = other RNA

SEQ ID NO: 487 - RNA, 101 nt, synthetic construct; identical to SEQ ID NO: 287
  misc_feature 1..101: note = Synthetic
  misc_feature 1..101: note = See specification as filed for detailed description of substitutions and modifications
  source 1..101: mol_type = other RNA

SEQ ID NO: 488 - RNA, 101 nt, synthetic construct; identical to SEQ ID NO: 288
  misc_feature 1..101: note = Synthetic
  misc_feature 1..101: note = See specification as filed for detailed description of substitutions and modifications
  source 1..101: mol_type = other RNA

SEQ ID NO: 489 - RNA, 101 nt, synthetic construct; identical to SEQ ID NO: 289
  misc_feature 1..101: note = Synthetic
  misc_feature 1..101: note = See specification as filed for detailed description of substitutions and modifications
  source 1..101: mol_type = other RNA

SEQ ID NO: 490 - RNA, 101 nt, synthetic construct; identical to SEQ ID NO: 214
  misc_feature 1..101: note = Synthetic
  misc_feature 1..101: note = See specification as filed for detailed description of substitutions and modifications
  source 1..101: mol_type = other RNA

SEQ ID NO: 491 - RNA, 101 nt, synthetic construct; identical to SEQ ID NO: 278
  misc_feature 1..101: note = Synthetic
  misc_feature 1..101: note = See specification as filed for detailed description of substitutions and modifications
  source 1..101: mol_type = other RNA

SEQ ID NO: 492 - RNA, 100 nt, synthetic construct
  misc_feature 1..100: note = Synthetic
  misc_feature 1..100: note = See specification as filed for detailed description of substitutions and modifications
  source 1..100: mol_type = other RNA
atctgcctttatagggcaccgttttagagctagaaatagcaagttaaaataaggctagtccgttatcaacttgaaaaagtggcaccgagtcggtgctttt

SEQ ID NO: 493 - RNA, 99 nt, synthetic construct
  misc_feature 1..99: note = Synthetic
  misc_feature 1..99: note = See specification as filed for detailed description of substitutions and modifications
  source 1..99: mol_type = other RNA
agtcacgatgcctttataggttttagagctagaaatagcaagttaaaataaggctagtccgttatcaacttgaaaaagtggcaccgagtcggtgctttt

SEQ ID NO: 494 - RNA, 100 nt, synthetic construct
  misc_feature 1..100: note = Synthetic
  misc_feature 1..100: note = See specification as filed for detailed description of substitutions and modifications
  source 1..100: mol_type = other RNA
ggttgcaaggaatgagaaccgttttagagctagaaatagcaagttaaaataaggctagtccgttatcaacttgaaaaagtggcaccgagtcggtgctttt

SEQ ID NO: 495-499 - skipped (5 entries)

SEQ ID NO: 500 - RNA, 145 nt, synthetic construct
  misc_feature 1..145: note = Synthetic
  source 1..145: mol_type = other RNA
nnnnnnnnnnnnnnnnnnnnnnnngttgtagctccctttctcatttcggaaacgaaatgagaaccgttgctacaataaggccgtctgaaaagatgtgccgcaacgctctgccccttaaagcttctgctttaaggggcatcgttta

SEQ ID NO: 501-599 - skipped (99 entries)

SEQ ID NO: 600 - protein, 1105 aa, synthetic construct
  REGION 1..1105: note = Synthetic
MTGAAFKPNPINYILGLDIGIASVGWAMVEIDEEENPIRLIDLGVRVFERAEVPKTGDSLAMARRLARSVRRLTRRRAHRLLRARRLLKREGVLQAADFDENGLIKSLPNTPWQLRAAALDRKLTPLEWSAVLLHLIKHRGYLSQRKNEGETADKELGALLKGVANNAHALQTGDFRTPAELALNKFEKESGHIRNQRGDYSHTFSRKDLQAELILLFEKQKEFGNPHVSGGLKEGIETLLMTQRPALSGDAVQKMLGHCTFEPAEPKAAKNTYTAERFIWLTKLNNLRILEQGSERPLTDTERATLMDEPYRKSKLTYAQARKLLGLEDTAFFKGLRYGKDNAEASTLMEMKAYHAISRALEKEGLKDKKSPLNLSSELQDEIGTAFSLFKTDEDITGRLKDRVQPEILEALLKHISFDKFVQISLKALRRIVPLMEQGKRYDEACAEIYGDHYGKKNTEEKIYLPPIPADEIRNPVVLRALSQARKVINGVVRRYGSPARIHIETAREVGKSFKDRKEIEKRQEENRKDREKAAAKFREYFPNFVGEPKSKDILKLRLYEQQHGKCLYSGKEINLVRLNEKGYVEIDHALPFSRTWDDSFNNKVLVLGSENQNKGNQTPYEYFNGKDNSREWQEFKARVETSRFPRSKKQRILLQKFDEDGFKECNLNDTRYVNRFLCQFVADHILLTGKGKRRVFASNGQITNLLRGFWGLRKVRAENDRHHALDAVVVACSTVAMQQKITRFVRYKEMNAFDGKTIDKETGKVLHQKTHFPQPWEFFAQEVMIRVFGKPDGKPEFEEADTPEKLRTLLAEKLSSRPEAVHEYVTPLFVSRAPNRKMSGAHKDTLRSAKRFVKHNEKISVKRVWLTEIKLADLENMVNYKNGREIELYEALKARLEAYGGNAKQAFDPKDNPFYKKGGQLVKAVRVEKTQESGVLLNKKNAYTIADNGDMVRVDVFCKVDKKGKNQYFIVPIYAWQVAENILPDIDCKGYRIDDSYTFCFSLHKYDLIAFQKDEKSKVEFAYYINCDSSNGRFYLAWHDKGSKEQQFRISTQNLVLIQKYQVNELGKEIRPCRLKKRPPVRSGKRTADGSEFESPKKKRKVE

SEQ ID NO: 601 - protein, 1105 aa, synthetic construct; identical to SEQ ID NO: 600
  REGION 1..1105: note = Synthetic

SEQ ID NO: 602 - protein, 1105 aa, synthetic construct; identical to SEQ ID NO: 600
  REGION 1..1105: note = Synthetic

SEQ ID NO: 603 - protein, 1105 aa, synthetic construct; identical to SEQ ID NO: 600
  REGION 1..1105: note = Synthetic

SEQ ID NO: 604 - protein, 1593 aa, synthetic construct
  REGION 1..1593: note = Synthetic
MEASPASGPRHLMDPHIFTSNFNNGIGRHKTYLCYEVERLDNGTSVKMDQHRGFLHNQAKNLLCGFYGRHAELRFLDLVPSLQLDPAQIYRVTWFISWSPCFSWGCAGEVRAFLQENTHVRLRIFAARIYDYDPLYKEALQMLRDAGAQVSIMTYDEFKHCWDTFVDHQGCPFQPWDGLDEHSQALSGRLRAILQNQGNSGSETPGTSESATPESDKKYSIGLAIGTNSVGWAVITDEYKVPSKKFKVLGNTDRHSIKKNLIGALLFDSGETAEATRLKRTARRRYTRRKNRICYLQEIFSNEMAKVDDSFFHRLEESFLVEEDKKHERHPIFGNIVDEVAYHEKYPTIYHLRKKLVDSTDKADLRLIYLALAHMIKFRGHFLIEGDLNPDNSDVDKLFIQLVQTYNQLFEENPINASGVDAKAILSARLSKSRRLENLIAQLPGEKKNGLFGNLIALSLGLTPNFKSNFDLAEDAKLQLSKDTYDDDLDNLLAQIGDQYADLFLAAKNLSDAILLSDILRVNTEITKAPLSASMIKRYDEHHQDLTLLKALVRQQLPEKYKEIFFDQSKNGYAGYIDGGASQEEFYKFIKPILEKMDGTEELLVKLNREDLLRKQRTFDNGSIPHQIHLGELHAILRRQEDFYPFLKDNREKIEKILTFRIPYYVGPLARGNSRFAWMTRKSEETITPWNFEEVVDKGASAQSFIERMTNFDKNLPNEKVLPKHSLLYEYFTVYNELTKVKYVTEGMRKPAFLSGEQKKAIVDLLFKTNRKVTVKQLKEDYFKKIECFDSVEISGVEDRFNASLGTYHDLLKIIKDKDFLDNEENEDILEDIVLTLTLFEDREMIEERLKTYAHLFDDKVMKQLKRRRYTGWGRLSRKLINGIRDKQSGKTILDFLKSDGFANRNFMQLIHDDSLTFKEDIQKAQVSGQGDSLHEHIANLAGSPAIKKGILQTVKVVDELVKVMGRHKPENIVIEMARENQTTQKGQKNSRERMKRIEEGIKELGSQILKEHPVENTQLQNEKLYLYYLQNGRDMYVDQELDINRLSDYDVDHIVPQSFLKDDSIDNKVLTRSDKNRGKSDNVPSEEVVKKMKNYWRQLLNAKLITQRKFDNLTKAERGGLSELDKAGFIKRQLVETRQITKHVAQILDSRMNTKYDENDKLIREVKVITLKSKLVSDFRKDFQFYKVREINNYHHAHDAYLNAVVGTALIKKYPKLESEFVYGDYKVYDVRKMIAKSEQEIGKATAKYFFYSNIMNFFKTEITLANGEIRKRPLIETNGETGEIVWDKGRDFATVRKVLSMPQVNIVKKTEVQTGGFSKESILPKRNSDKLIARKKDWDPKKYGGFDSPTVAYSVLVVAKVEKGKSKKLKSVKELLGITIMERSSFEKNPIDFLEAKGYKEVKKDLIIKLPKYSLFELENGRKRMLASAGELQKGNELALPSKYVNFLYLASHYEKLKGSPEDNEQKQLFVEQHKHYLDEIIEQISEFSKRVILADANLDKVLSAYNKHRDKPIREQAENIIHLFTLTNLGAPAAFKYFDTTIDRKRYTSTKEVLDATLIHQSITGLYETRIDLSQLGGDGGGSPKKKRKV

SEQ ID NO: 605 - protein, 1103 aa, synthetic construct
  REGION 1..1103: note = Synthetic
MAAFKPNSINYILGLDIGIASVGWAMVEIDEEENPIRLIDLGVRVFERAEVPKTGDSLAMARRLARSVRRLTRRRAHRLLRTRRLLKREGVLQAANFDENGLIKSLPNTPWQLRAAALDRKLTPLEWSAVLLHLIKHRGYLSQRKNEGETADKELGALLKGVAGNAHALQTGDFRTPAELALNKFEKESGHIRNQRSDYSHTFSRKDLQAELILLFEKQKEFGNPHVSGGLKEGIETLLMTQRPALSGDAVQKMLGHCTFEPAEPKAAKNTYTAERFIWLTKLNNLRILEQGSERPLTDTERATLMDEPYRKSKLTYAQARKLLGLEDTAFFKGLRYGKDNAEASTLMEMKAYHAISRALEKEGLKDKKSPLNLSPELQDEIGTAFSLFKTDEDITGRLKDRIQPEILEALLKHISFDKFVQISLKALRRIVPLMEQGKRYDEACAEIYGDHYGKKNTEEKIYLPPIPADEIRNPVVLRALSQARKVINGVVRRYGSPARIHIETAREVGKSFKDRKEIEKRQEENRKDREKAAAKFREYFPNFVGEPKSKDILKLRLYEQQHGKCLYSGKEINLGRLNEKGYVEIDHALPFSRTWDDSFNNKVLVLGSENQNKGNQTPYEYFNGKDNSREWQEFKARVETSRFPRSKKQRILLQKFDEDGFKERNLNDTRYVNRFLCQFVADRMRLTGKGKKRVFASNGQITNLLRGFWGLRKVRAENDRHHALDAVVVACSTVAMQQKITRFVRYKEMNAFDGKTIDKETGEVLHQKTHFPQPWEFFAQEVMIRVFGKPDGKPEFEEADTLEKLRTLLAEKLSSRPEAVHEYVTPLFVSRAPNRKMSGQGHMETVKSAKRLDEGVSVLRVPLTQLKLKDLEKMVNREREPKLYEALKARLEAHKDDPAKAFAEPFYKYDKAGNRTQQVKAVRVEQVQKTGVWVRNHNGIADNATMVRVDVFEKGDKYYLVPIYSWQVAKGILPDRAVVQGKDEEDWQLIDDSFNFKFSLHPNDLVEVITKKARMFGYFASCHRGTGNINIRIHDLDHKIGKNGILEGIGVKTALSFQKYQIDELGKEIRPCRLKKRPPVRSGKRTADGSEFESPKKKRKVE

SEQ ID NO: 606 - protein, 107 aa, synthetic construct
  REGION 1..107: note = Synthetic
MTNLSDIIEKETGKQLVIQESILMLPEEVEEVIGNKPESDILVHTAYDESTDENVMLLTSDAPEYKPWALVIQDSNGENKIKMLSGGSKRTADGSEFESPKKKRKVE

SEQ ID NO: 607 - protein, 1097 aa, synthetic construct
  REGION 1..1097: note = Synthetic
MAAFKPNPINYILGLDIGIASVGWAMVEIDEEENPIRLIDLGVRVFERAEVPKTGDSLAMARRLARSVRRLTRRRAHRLLRARRLLKREGVLQAADFDENGLIKSLPNTPWQLRAAALDRKLTPLEWSAVLLHLIKHRGYLSQRKNEGETADKELGALLKGVANNAHALQTGDFRTPAELALNKFEKESGHIRNQRGDYSHTFSRKDLQAELILLFEKQKEFGNPHVSGGLKEGIETLLMTQRPALSGDAVQKMLGHCTFEPAEPKAAKNTYTAERFIWLTKLNNLRILEQGSERPLTDTERATLMDEPYRKSKLTYAQARKLLGLEDTAFFKGLRYGKDNAEASTLMEMKAYHAISRALEKEGLKDKKSPLNLSSELQDEIGTAFSLFKTDEDITGRLKDRVQPEILEALLKHISFDKFVQISLKALRRIVPLMEQGKRYDEACAEIYGDHYGKKNTEEKIYLPPIPADEIRNPVVLRALSQARKVINGVVRRYGSPARIHIETAREVGKSFKDRKEIEKRQEENRKDREKAAAKFREYFPNFVGEPKSKDILKLRLYEQQHGKCLYSGKEINLVRLNEKGYVEIDHALPFSRTWDDSFNNKVLVLGSENQNKGNQTPYEYFNGKDNSREWQEFKARVETSRFPRSKKQRILLQKFDEDGFKECNLNDTRYVNRFLCQFVADHILLTGKGKRRVFASNGQITNLLRGFWGLRKVRAENDRHHALDAVVVACSTVAMQQKITRFVRYKEMNAFDGKTIDKETGKVLHQKTHFPQPWEFFAQEVMIRVFGKPDGKPEFEEADTPEKLRTLLAEKLSSRPEAVHEYVTPLFVSRAPNRKMSGAHKDTLRSAKRFVKHNEKISVKRVWLTEIKLADLENMVNYKNGREIELYEALKARLEAYGGNAKQAFDPKDNPFYKKGGQLVKAVRVEKTQESGVLLNKKNAYTIADNGDMVRVDVFCKVDKSGGGSPKKKRKVSGGSGKNQYFIVPIYAWQVAENILPDIDCKGYRIDDSYTFCFSLHKYDLIAFQKDEKSKVEFAYYINCDSSNGRFYLAWHDKGSKEQQFRISTQNLVLIQKYQVNELGKEIRPCRLKKRPPVR

SEQ ID NO: 608 - protein, 1110 aa, synthetic construct
  REGION 1..1110: note = Synthetic
MVPKKKRKVAAFKPNPINYILGLDIGIASVGWAMVEIDEEENPIRLIDLGVRVFERAEVPKTGDSLAMARRLARSVRRLTRRRAHRLLRARRLLKREGVLQAADFDENGLIKSLPNTPWQLRAAALDRKLTPLEWSAVLLHLIKHRGYLSQRKNEGETADKELGALLKGVANNAHALQTGDFRTPAELALNKFEKESGHIRNQRGDYSHTFSRKDLQAELILLFEKQKEFGNPHVSGGLKEGIETLLMTQRPALSGDAVQKMLGHCTFEPAEPKAAKNTYTAERFIWLTKLNNLRILEQGSERPLTDTERATLMDEPYRKSKLTYAQARKLLGLEDTAFFKGLRYGKDNAEASTLMEMKAYHAISRALEKEGLKDKKSPLNLSSELQDEIGTAFSLFKTDEDITGRLKDRVQPEILEALLKHISFDKFVQISLKALRRIVPLMEQGKRYDEACAEIYGDHYGKKNTEEKIYLPPIPADEIRNPVVLRALSQARKVINGVVRRYGSPARIHIETAREVGKSFKDRKEIEKRQEENRKDREKAAAKFREYFPNFVGEPKSKDILKLRLYEQQHGKCLYSGKEINLVRLNEKGYVEIDHALPFSRTWDDSFNNKVLVLGSENQNKGNQTPYEYFNGKDNSREWQEFKARVETSRFPRSKKQRILLQKFDEDGFKECNLNDTRYVNRFLCQFVADHILLTGKGKRRVFASNGQITNLLRGFWGLRKVRAENDRHHALDAVVVACSTVAMQQKITRFVRYKEMNAFDGKTIDKETGKVLHQKTHFPQPWEFFAQEVMIRVFGKPDGKPEFEEADTPEKLRTLLAEKLSSRPEAVHEYVTPLFVSRAPNRKMSGAHKDTLRSAKRFVKHNEKISVKRVWLTEIKLADLENMVNYKNGREIELYEALKARLEAYGGNAKQAFDPKDNPFYKKGGQLVKAVRVEKTQESGVLLNKKNAYTIADNGDMVRVDVFCKVDKKGKNQYFIVPIYAWQVAENILPDIDCKGYRIDDSYTFCFSLHKYDLIAFQKDEKSKVEFAYYINCDSSNGRFYLAWHDKGSKEQQFRISTQNLVLIQKYQVNELGKEIRPCRLKKRPPVRYPYDVPDYAAAPAAKKKKLD

SEQ ID NO: 609 - protein, 1082 aa, synthetic construct
  REGION 1..1082: note = Synthetic
MAAFKPNPINYILGLDIGIASVGWAMVEIDEEENPIRLIDLGVRVFERAEVPKTGDSLAMARRLARSVRRLTRRRAHRLLRARRLLKREGVLQAADFDENGLIKSLPNTPWQLRAAALDRKLTPLEWSAVLLHLIKHRGYLSQRKNEGETADKELGALLKGVANNAHALQTGDFRTPAELALNKFEKESGHIRNQRGDYSHTFSRKDLQAELILLFEKQKEFGNPHVSGGLKEGIETLLMTQRPALSGDAVQKMLGHCTFEPAEPKAAKNTYTAERFIWLTKLNNLRILEQGSERPLTDTERATLMDEPYRKSKLTYAQARKLLGLEDTAFFKGLRYGKDNAEASTLMEMKAYHAISRALEKEGLKDKKSPLNLSSELQDEIGTAFSLFKTDEDITGRLKDRVQPEILEALLKHISFDKFVQISLKALRRIVPLMEQGKRYDEACAEIYGDHYGKKNTEEKIYLPPIPADEIRNPVVLRALSQARKVINGVVRRYGSPARIHIETAREVGKSFKDRKEIEKRQEENRKDREKAAAKFREYFPNFVGEPKSKDILKLRLYEQQHGKCLYSGKEINLVRLNEKGYVEIDHALPFSRTWDDSFNNKVLVLGSENQNKGNQTPYEYFNGKDNSREWQEFKARVETSRFPRSKKQRILLQKFDEDGFKECNLNDTRYVNRFLCQFVADHILLTGKGKRRVFASNGQITNLLRGFWGLRKVRAENDRHHALDAVVVACSTVAMQQKITRFVRYKEMNAFDGKTIDKETGKVLHQKTHFPQPWEFFAQEVMIRVFGKPDGKPEFEEADTPEKLRTLLAEKLSSRPEAVHEYVTPLFVSRAPNRKMSGAHKDTLRSAKRFVKHNEKISVKRVWLTEIKLADLENMVNYKNGREIELYEALKARLEAYGGNAKQAFDPKDNPFYKKGGQLVKAVRVEKTQESGVLLNKKNAYTIADNGDMVRVDVFCKVDKKGKNQYFIVPIYAWQVAENILPDIDCKGYRIDDSYTFCFSLHKYDLIAFQKDEKSKVEFAYYINCDSSNGRFYLAWHDKGSKEQQFRISTQNLVLIQKYQVNELGKEIRPCRLKKRPPVR

SEQ ID NO: 610 - protein, 1082 aa, synthetic construct; identical to SEQ ID NO: 609
  REGION 1..1082: note = Synthetic

SEQ ID NO: 611 - protein, 1102 aa, synthetic construct
  REGION 1..1102: note = Synthetic
MDGSGGGSPKKKRKVGGSGGGAAFKPNPINYILGLDIGIASVGWAMVEIDEEENPIRLIDLGVRVFERAEVPKTGDSLAMARRLARSVRRLTRRRAHRLLRARRLLKREGVLQAADFDENGLIKSLPNTPWQLRAAALDRKLTPLEWSAVLLHLIKHRGYLSQRKNEGETADKELGALLKGVANNAHALQTGDFRTPAELALNKFEKESGHIRNQRGDYSHTFSRKDLQAELILLFEKQKEFGNPHVSGGLKEGIETLLMTQRPALSGDAVQKMLGHCTFEPAEPKAAKNTYTAERFIWLTKLNNLRILEQGSERPLTDTERATLMDEPYRKSKLTYAQARKLLGLEDTAFFKGLRYGKDNAEASTLMEMKAYHAISRALEKEGLKDKKSPLNLSSELQDEIGTAFSLFKTDEDITGRLKDRVQPEILEALLKHISFDKFVQISLKALRRIVPLMEQGKRYDEACAEIYGDHYGKKNTEEKIYLPPIPADEIRNPVVLRALSQARKVINGVVRRYGSPARIHIETAREVGKSFKDRKEIEKRQEENRKDREKAAAKFREYFPNFVGEPKSKDILKLRLYEQQHGKCLYSGKEINLVRLNEKGYVEIDHALPFSRTWDDSFNNKVLVLGSENQNKGNQTPYEYFNGKDNSREWQEFKARVETSRFPRSKKQRILLQKFDEDGFKECNLNDTRYVNRFLCQFVADHILLTGKGKRRVFASNGQITNLLRGFWGLRKVRAENDRHHALDAVVVACSTVAMQQKITRFVRYKEMNAFDGKTIDKETGKVLHQKTHFPQPWEFFAQEVMIRVFGKPDGKPEFEEADTPEKLRTLLAEKLSSRPEAVHEYVTPLFVSRAPNRKMSGAHKDTLRSAKRFVKHNEKISVKRVWLTEIKLADLENMVNYKNGREIELYEALKARLEAYGGNAKQAFDPKDNPFYKKGGQLVKAVRVEKTQESGVLLNKKNAYTIADNGDMVRVDVFCKVDKKGKNQYFIVPIYAWQVAENILPDIDCKGYRIDDSYTFCFSLHKYDLIAFQKDEKSKVEFAYYINCDSSNGRFYLAWHDKGSKEQQFRISTQNLVLIQKYQVNELGKEIRPCRLKKRPPVR

SEQ ID NO: 612 - protein, 1121 aa, synthetic construct
  REGION 1..1121: note = Synthetic
MDGSGGGSPKKKRKVGGSGGGAAFKPNPINYILGLDIGIASVGWAMVEIDEEENPIRLIDLGVRVFERAEVPKTGDSLAMARRLARSVRRLTRRRAHRLLRARRLLKREGVLQAADFDENGLIKSLPNTPWQLRAAALDRKLTPLEWSAVLLHLIKHRGYLSQRKNEGETADKELGALLKGVANNAHALQTGDFRTPAELALNKFEKESGHIRNQRGDYSHTFSRKDLQAELILLFEKQKEFGNPHVSGGLKEGIETLLMTQRPALSGDAVQKMLGHCTFEPAEPKAAKNTYTAERFIWLTKLNNLRILEQGSERPLTDTERATLMDEPYRKSKLTYAQARKLLGLEDTAFFKGLRYGKDNAEASTLMEMKAYHAISRALEKEGLKDKKSPLNLSSELQDEIGTAFSLFKTDEDITGRLKDRVQPEILEALLKHISFDKFVQISLKALRRIVPLMEQGKRYDEACAEIYGDHYGKKNTEEKIYLPPIPADEIRNPVVLRALSQARKVINGVVRRYGSPARIHIETAREVGKSFKDRKEIEKRQEENRKDREKAAAKFREYFPNFVGEPKSKDILKLRLYEQQHGKCLYSGKEINLVRLNEKGYVEIDHALPFSRTWDDSFNNKVLVLGSENQNKGNQTPYEYFNGKDNSREWQEFKARVETSRFPRSKKQRILLQKFDEDGFKECNLNDTRYVNRFLCQFVADHILLTGKGKRRVFASNGQITNLLRGFWGLRKVRAENDRHHALDAVVVACSTVAMQQKITRFVRYKEMNAFDGKTIDKETGKVLHQKTHFPQPWEFFAQEVMIRVFGKPDGKPEFEEADTPEKLRTLLAEKLSSRPEAVHEYVTPLFVSRAPNRKMSGAHKDTLRSAKRFVKHNEKISVKRVWLTEIKLADLENMVNYKNGREIELYEALKARLEAYGGNAKQAFDPKDNPFYKKGGQLVKAVRVEKTQESGVLLNKKNAYTIADNGDMVRVDVFCKVDKKGKNQYFIVPIYAWQVAENILPDIDCKGYRIDDSYTFCFSLHKYDLIAFQKDEKSKVEFAYYINCDSSNGRFYLAWHDKGSKEQQFRISTQNLVLIQKYQVNELGKEIRPCRLKKRPPVRSESATPESVSGWRLFKKIS

SEQ ID NO: 613 - protein, 1124 aa, synthetic construct
  REGION 1..1124: note = Synthetic
MDGSGGGSPKKKRKVGGSGGGAAFKPNPINYILGLDIGIASVGWAMVEIDEEENPIRLIDLGVRVFERAEVPKTGDSLAMARRLARSVRRLTRRRAHRLLRARRLLKREGVLQAADFDENGLIKSLPNTPWQLRAAALDRKLTPLEWSAVLLHLIKHRGYLSQRKNEGETADKELGALLKGVANNAHALQTGDFRTPAELALNKFEKESGHIRNQRGDYSHTFSRKDLQAELILLFEKQKEFGNPHVSGGLKEGIETLLMTQRPALSGDAVQKMLGHCTFEPAEPKAAKNTYTAERFIWLTKLNNLRILEQGSERPLTDTERATLMDEPYRKSKLTYAQARKLLGLEDTAFFKGLRYGKDNAEASTLMEMKAYHAISRALEKEGLKDKKSPLNLSSELQDEIGTAFSLFKTDEDITGRLKDRVQPEILEALLKHISFDKFVQISLKALRRIVPLMEQGKRYDEACAEIYGDHYGKKNTEEKIYLPPIPADEIRNPVVLRALSQARKVINGVVRRYGSPARIHIETAREVGKSFKDRKEIEKRQEENRKDREKAAAKFREYFPNFVGEPKSKDILKLRLYEQQHGKCLYSGKEINLVRLNEKGYVEIDHALPFSRTWDDSFNNKVLVLGSENQNKGNQTPYEYFNGKDNSREWQEFKARVETSRFPRSKKQRILLQKFDEDGFKECNLNDTRYVNRFLCQFVADHILLTGKGKRRVFASNGQITNLLRGFWGLRKVRAENDRHHALDAVVVACSTVAMQQKITRFVRYKEMNAFDGKTIDKETGKVLHQKTHFPQPWEFFAQEVMIRVFGKPDGKPEFEEADTPEKLRTLLAEKLSSRPEAVHEYVTPLFVSRAPNRKMSGAHKDTLRSAKRFVKHNEKISVKRVWLTEIKLADLENMVNYKNGREIELYEALKARLEAYGGNAKQAFDPKDNPFYKKGGQLVKAVRVEKTQESGVLLNKKNAYTIADNGDMVRVDVFCKVDKKGKNQYFIVPIYAWQVAENILPDIDCKGYRIDDSYTFCFSLHKYDLIAFQKDEKSKVEFAYYINCDSSNGRFYLAWHDKGSKEQQFRISTQNLVLIQKYQVNELGKEIRPCRLKKRPPVRSGKRTADGSGGGSPAAKKKKLD

SEQ ID NO: 614 - protein, 1120 aa, synthetic construct
  REGION 1..1120: note = Synthetic
MDGSGGGSPKKKRKVEDKRPAATKKAGQAKKKKGGSGGGAAFKPNPINYILGLDIGIASVGWAMVEIDEEENPIRLIDLGVRVFERAEVPKTGDSLAMARRLARSVRRLTRRRAHRLLRARRLLKREGVLQAADFDENGLIKSLPNTPWQLRAAALDRKLTPLEWSAVLLHLIKHRGYLSQRKNEGETADKELGALLKGVANNAHALQTGDFRTPAELALNKFEKESGHIRNQRGDYSHTFSRKDLQAELILLFEKQKEFGNPHVSGGLKEGIETLLMTQRPALSGDAVQKMLGHCTFEPAEPKAAKNTYTAERFIWLTKLNNLRILEQGSERPLTDTERATLMDEPYRKSKLTYAQARKLLGLEDTAFFKGLRYGKDNAEASTLMEMKAYHAISRALEKEGLKDKKSPLNLSSELQDEIGTAFSLFKTDEDITGRLKDRVQPEILEALLKHISFDKFVQISLKALRRIVPLMEQGKRYDEACAEIYGDHYGKKNTEEKIYLPPIPADEIRNPVVLRALSQARKVINGVVRRYGSPARIHIETAREVGKSFKDRKEIEKRQEENRKDREKAAAKFREYFPNFVGEPKSKDILKLRLYEQQHGKCLYSGKEINLVRLNEKGYVEIDHALPFSRTWDDSFNNKVLVLGSENQNKGNQTPYEYFNGKDNSREWQEFKARVETSRFPRSKKQRILLQKFDEDGFKECNLNDTRYVNRFLCQFVADHILLTGKGKRRVFASNGQITNLLRGFWGLRKVRAENDRHHALDAVVVACSTVAMQQKITRFVRYKEMNAFDGKTIDKETGKVLHQKTHFPQPWEFFAQEVMIRVFGKPDGKPEFEEADTPEKLRTLLAEKLSSRPEAVHEYVTPLFVSRAPNRKMSGAHKDTLRSAKRFVKHNEKISVKRVWLTEIKLADLENMVNYKNGREIELYEALKARLEAYGGNAKQAFDPKDNPFYKKGGQLVKAVRVEKTQESGVLLNKKNAYTIADNGDMVRVDVFCKVDKKGKNQYFIVPIYAWQVAENILPDIDCKGYRIDDSYTFCFSLHKYDLIAFQKDEKSKVEFAYYINCDSSNGRFYLAWHDKGSKEQQFRISTQNLVLIQKYQVNELGKEIRPCRLKKRPPVR

SEQ ID NO: 615 - protein, 1139 aa, synthetic construct
  REGION 1..1139: note = Synthetic
MDGSGGGSPKKKRKVEDKRPAATKKAGQAKKKKGGSGGGAAFKPNPINYILGLDIGIASVGWAMVEIDEEENPIRLIDLGVRVFERAEVPKTGDSLAMARRLARSVRRLTRRRAHRLLRARRLLKREGVLQAADFDENGLIKSLPNTPWQLRAAALDRKLTPLEWSAVLLHLIKHRGYLSQRKNEGETADKELGALLKGVANNAHALQTGDFRTPAELALNKFEKESGHIRNQRGDYSHTFSRKDLQAELILLFEKQKEFGNPHVSGGLKEGIETLLMTQRPALSGDAVQKMLGHCTFEPAEPKAAKNTYTAERFIWLTKLNNLRILEQGSERPLTDTERATLMDEPYRKSKLTYAQARKLLGLEDTAFFKGLRYGKDNAEASTLMEMKAYHAISRALEKEGLKDKKSPLNLSSELQDEIGTAFSLFKTDEDITGRLKDRVQPEILEALLKHISFDKFVQISLKALRRIVPLMEQGKRYDEACAEIYGDHYGKKNTEEKIYLPPIPADEIRNPVVLRALSQARKVINGVVRRYGSPARIHIETAREVGKSFKDRKEIEKRQEENRKDREKAAAKFREYFPNFVGEPKSKDILKLRLYEQQHGKCLYSGKEINLVRLNEKGYVEIDHALPFSRTWDDSFNNKVLVLGSENQNKGNQTPYEYFNGKDNSREWQEFKARVETSRFPRSKKQRILLQKFDEDGFKECNLNDTRYVNRFLCQFVADHILLTGKGKRRVFASNGQITNLLRGFWGLRKVRAENDRHHALDAVVVACSTVAMQQKITRFVRYKEMNAFDGKTIDKETGKVLHQKTHFPQPWEFFAQEVMIRVFGKPDGKPEFEEADTPEKLRTLLAEKLSSRPEAVHEYVTPLFVSRAPNRKMSGAHKDTLRSAKRFVKHNEKISVKRVWLTEIKLADLENMVNYKNGREIELYEALKARLEAYGGNAKQAFDPKDNPFYKKGGQLVKAVRVEKTQESGVLLNKKNAYTIADNGDMVRVDVFCKVDKKGKNQYFIVPIYAWQVAENILPDIDCKGYRIDDSYTFCFSLHKYDLIAFQKDEKSKVEFAYYINCDSSNGRFYLAWHDKGSKEQQFRISTQNLVLIQKYQVNELGKEIRPCRLKKRPPVRSESATPESVSGWRLFKKIS

SEQ ID NO: 616 - protein, 1113 aa, synthetic construct
  REGION 1..1113: note = Synthetic
MDGSGGGSEDKRPAATKKAGQAKKKKGGSGGGAAFKPNPINYILGLDIGIASVGWAMVEIDEEENPIRLIDLGVRVFERAEVPKTGDSLAMARRLARSVRRLTRRRAHRLLRARRLLKREGVLQAADFDENGLIKSLPNTPWQLRAAALDRKLTPLEWSAVLLHLIKHRGYLSQRKNEGETADKELGALLKGVANNAHALQTGDFRTPAELALNKFEKESGHIRNQRGDYSHTFSRKDLQAELILLFEKQKEFGNPHVSGGLKEGIETLLMTQRPALSGDAVQKMLGHCTFEPAEPKAAKNTYTAERFIWLTKLNNLRILEQGSERPLTDTERATLMDEPYRKSKLTYAQARKLLGLEDTAFFKGLRYGKDNAEASTLMEMKAYHAISRALEKEGLKDKKSPLNLSSELQDEIGTAFSLFKTDEDITGRLKDRVQPEILEALLKHISFDKFVQISLKALRRIVPLMEQGKRYDEACAEIYGDHYGKKNTEEKIYLPPIPADEIRNPVVLRALSQARKVINGVVRRYGSPARIHIETAREVGKSFKDRKEIEKRQEENRKDREKAAAKFREYFPNFVGEPKSKDILKLRLYEQQHGKCLYSGKEINLVRLNEKGYVEIDHALPFSRTWDDSFNNKVLVLGSENQNKGNQTPYEYFNGKDNSREWQEFKARVETSRFPRSKKQRILLQKFDEDGFKECNLNDTRYVNRFLCQFVADHILLTGKGKRRVFASNGQITNLLRGFWGLRKVRAENDRHHALDAVVVACSTVAMQQKITRFVRYKEMNAFDGKTIDKETGKVLHQKTHFPQPWEFFAQEVMIRVFGKPDGKPEFEEADTPEKLRTLLAEKLSSRPEAVHEYVTPLFVSRAPNRKMSGAHKDTLRSAKRFVKHNEKISVKRVWLTEIKLADLENMVNYKNGREIELYEALKARLEAYGGNAKQAFDPKDNPFYKKGGQLVKAVRVEKTQESGVLLNKKNAYTIADNGDMVRVDVFCKVDKKGKNQYFIVPIYAWQVAENILPDIDCKGYRIDDSYTFCFSLHKYDLIAFQKDEKSKVEFAYYINCDSSNGRFYLAWHDKGSKEQQFRISTQNLVLIQKYQVNELGKEIRPCRLKKRPPVR

SEQ ID NO: 617 - protein, 1355 aa, synthetic construct
  REGION 1..1355: note = Synthetic
MDGSGGGSPKKKRKVEDKRPAATKKAGQAKKKKGGSGGGEASPASGPRHLMDPHIFTSNFNNGIGRHKTYLCYEVERLDNGTSVKMDQHRGFLHNQAKNLLCGFYGRHAELRFLDLVPSLQLDPAQIYRVTWFISWSPCFSWGCAGEVRAFLQENTHVRLRIFAARIYDYDPLYKEALQMLRDAGAQVSIMTYDEFKHCWDTFVDHQGCPFQPWDGLDEHSQALSGRLRAILQNQGNSGSETPGTSESATPESAAFKPNPINYILGLAIGIASVGWAMVEIDEEENPIRLIDLGVRVFERAEVPKTGDSLAMARRLARSVRRLTRRRAHRLLRARRLLKREGVLQAADFDENGLIKSLPNTPWQLRAAALDRKLTPLEWSAVLLHLIKHRGYLSQRKNEGETADKELGALLKGVANNAHALQTGDFRTPAELALNKFEKESGHIRNQRGDYSHTFSRKDLQAELILLFEKQKEFGNPHVSGGLKEGIETLLMTQRPALSGDAVQKMLGHCTFEPAEPKAAKNTYTAERFIWLTKLNNLRILEQGSERPLTDTERATLMDEPYRKSKLTYAQARKLLGLEDTAFFKGLRYGKDNAEASTLMEMKAYHAISRALEKEGLKDKKSPLNLSSELQDEIGTAFSLFKTDEDITGRLKDRVQPEILEALLKHISFDKFVQISLKALRRIVPLMEQGKRYDEACAEIYGDHYGKKNTEEKIYLPPIPADEIRNPVVLRALSQARKVINGVVRRYGSPARIHIETAREVGKSFKDRKEIEKRQEENRKDREKAAAKFREYFPNFVGEPKSKDILKLRLYEQQHGKCLYSGKEINLVRLNEKGYVEIDHALPFSRTWDDSFNNKVLVLGSENQNKGNQTPYEYFNGKDNSREWQEFKARVETSRFPRSKKQRILLQKFDEDGFKECNLNDTRYVNRFLCQFVADHILLTGKGKRRVFASNGQITNLLRGFWGLRKVRAENDRHHALDAVVVACSTVAMQQKITRFVRYKEMNAFDGKTIDKETGKVLHQKTHFPQPWEFFAQEVMIRVFGKPDGKPEFEEADTPEKLRTLLAEKLSSRPEAVHEYVTPLFVSRAPNRKMSGAHKDTLRSAKRFVKHNEKISVKRVWLTEIKLADLENMVNYKNGREIELYEALKARLEAYGGNAKQAFDPKDNPFYKKGGQLVKAVRVEKTQESGVLLNKKNAYTIADNGDMVRVDVFCKVDKKGKNQYFIVPIYAWQVAENILPDIDCKGYRIDDSYTFCFSLHKYDLIAFQKDEKSKVEFAYYINCDSSNGRFYLAWHDKGSKEQQFRISTQNLVLIQKYQVNELGKEIRPCRLKKRPPVRSGKRTADGSEFESPKKKRKVE

SEQ ID NO: 618 - protein, 1334 aa, synthetic construct
  REGION 1..1334: note = Synthetic
MDGSGGGSPKKKRKVEDKRPAATKKAGQAKKKKGGSGGGEASPASGPRHLMDPHIFTSNFNNGIGRHKTYLCYEVERLDNGTSVKMDQHRGFLHNQAKNLLCGFYGRHAELRFLDLVPSLQLDPAQIYRVTWFISWSPCFSWGCAGEVRAFLQENTHVRLRIFAARIYDYDPLYKEALQMLRDAGAQVSIMTYDEFKHCWDTFVDHQGCPFQPWDGLDEHSQALSGRLRAILQNQGNSGSETPGTSESATPESAAFKPNPINYILGLAIGIASVGWAMVEIDEEENPIRLIDLGVRVFERAEVPKTGDSLAMARRLARSVRRLTRRRAHRLLRARRLLKREGVLQAADFDENGLIKSLPNTPWQLRAAALDRKLTPLEWSAVLLHLIKHRGYLSQRKNEGETADKELGALLKGVANNAHALQTGDFRTPAELALNKFEKESGHIRNQRGDYSHTFSRKDLQAELILLFEKQKEFGNPHVSGGLKEGIETLLMTQRPALSGDAVQKMLGHCTFEPAEPKAAKNTYTAERFIWLTKLNNLRILEQGSERPLTDTERATLMDEPYRKSKLTYAQARKLLGLEDTAFFKGLRYGKDNAEASTLMEMKAYHAISRALEKEGLKDKKSPLNLSSELQDEIGTAFSLFKTDEDITGRLKDRVQPEILEALLKHISFDKFVQISLKALRRIVPLMEQGKRYDEACAEIYGDHYGKKNTEEKIYLPPIPADEIRNPVVLRALSQARKVINGVVRRYGSPARIHIETAREVGKSFKDRKEIEKRQEENRKDREKAAAKFREYFPNFVGEPKSKDILKLRLYEQQHGKCLYSGKEINLVRLNEKGYVEIDHALPFSRTWDDSFNNKVLVLGSENQNKGNQTPYEYFNGKDNSREWQEFKARVETSRFPRSKKQRILLQKFDEDGFKECNLNDTRYVNRFLCQFVADHILLTGKGKRRVFASNGQITNLLRGFWGLRKVRAENDRHHALDAVVVACSTVAMQQKITRFVRYKEMNAFDGKTIDKETGKVLHQKTHFPQPWEFFAQEVMIRVFGKPDGKPEFEEADTPEKLRTLLAEKLSSRPEAVHEYVTPLFVSRAPNRKMSGAHKDTLRSAKRFVKHNEKISVKRVWLTEIKLADLENMVNYKNGREIELYEALKARLEAYGGNAKQAFDPKDNPFYKKGGQLVKAVRVEKTQESGVLLNKKNAYTIADNGDMVRVDVFCKVDKKGKNQYFIVPIYAWQVAENILPDIDCKGYRIDDSYTFCFSLHKYDLIAFQKDEKSKVEFAYYINCDSSNGRFYLAWHDKGSKEQQFRISTQNLVLIQKYQVNELGKEIRPCRLKKRPPVR

SEQ ID NO: 619 - protein, 1317 aa, synthetic construct
  REGION 1..1317: note = Synthetic
MEASPASGPRHLMDPHIFTSNFNNGIGRHKTYLCYEVERLDNGTSVKMDQHRGFLHNQAKNLLCGFYGRHAELRFLDLVPSLQLDPAQIYRVTWFISWSPCFSWGCAGEVRAFLQENTHVRLRIFAARIYDYDPLYKEALQMLRDAGAQVSIMTYDEFKHCWDTFVDHQGCPFQPWDGLDEHSQALSGRLRAILQNQGNSGSETPGTSESATPESAAFKPNPINYILGLAIGIASVGWAMVEIDEEENPIRLIDLGVRVFERAEVPKTGDSLAMARRLARSVRRLTRRRAHRLLRARRLLKREGVLQAADFDENGLIKSLPNTPWQLRAAALDRKLTPLEWSAVLLHLIKHRGYLSQRKNEGETADKELGALLKGVANNAHALQTGDFRTPAELALNKFEKESGHIRNQRGDYSHTFSRKDLQAELILLFEKQKEFGNPHVSGGLKEGIETLLMTQRPALSGDAVQKMLGHCTFEPAEPKAAKNTYTAERFIWLTKLNNLRILEQGSERPLTDTERATLMDEPYRKSKLTYAQARKLLGLEDTAFFKGLRYGKDNAEASTLMEMKAYHAISRALEKEGLKDKKSPLNLSSELQDEIGTAFSLFKTDEDITGRLKDRVQPEILEALLKHISFDKFVQISLKALRRIVPLMEQGKRYDEACAEIYGDHYGKKNTEEKIYLPPIPADEIRNPVVLRALSQARKVINGVVRRYGSPARIHIETAREVGKSFKDRKEIEKRQEENRKDREKAAAKFREYFPNFVGEPKSKDILKLRLYEQQHGKCLYSGKEINLVRLNEKGYVEIDHALPFSRTWDDSFNNKVLVLGSENQNKGNQTPYEYFNGKDNSREWQEFKARVETSRFPRSKKQRILLQKFDEDGFKECNLNDTRYVNRFLCQFVADHILLTGKGKRRVFASNGQITNLLRGFWGLRKVRAENDRHHALDAVVVACSTVAMQQKITRFVRYKEMNAFDGKTIDKETGKVLHQKTHFPQPWEFFAQEVMIRVFGKPDGKPEFEEADTPEKLRTLLAEKLSSRPEAVHEYVTPLFVSRAPNRKMSGAHKDTLRSAKRFVKHNEKISVKRVWLTEIKLADLENMVNYKNGREIELYEALKARLEAYGGNAKQAFDPKDNPFYKKGGQLVKAVRVEKTQESGVLLNKKNAYTIADNGDMVRVDVFCKVDKKGKNQYFIVPIYAWQVAENILPDIDCKGYRIDDSYTFCFSLHKYDLIAFQKDEKSKVEFAYYINCDSSNGRFYLAWHDKGSKEQQFRISTQNLVLIQKYQVNELGKEIRPCRLKKRPPVRSGKRTADGSEFESPKKKRKVE

SEQ ID NO: 620 - protein, 1204 aa, synthetic construct
  REGION 1..1204: note = Synthetic
MKLGSIEFIKVNKGSGSGSGAPESATESGGTSTESEGSAGTSTESEGSAGSAGSTSTEEGTSTESEGSAGTSTESEGSAGTSESATESGGTSTESEGSSSTGAAFKPNPINYILGLDIGIASVGWAMVEIDEEENPIRLIDLGVRVFERAEVPKTGDSLAMARRLARSVRRLTRRRAHRLLRARRLLKREGVLQAADFDENGLIKSLPNTPWQLRAAALDRKLTPLEWSAVLLHLIKHRGYLSQRKNEGETADKELGALLKGVANNAHALQTGDFRTPAELALNKFEKESGHIRNQRGDYSHTFSRKDLQAELILLFEKQKEFGNPHVSGGLKEGIETLLMTQRPALSGDAVQKMLGHCTFEPAEPKAAKNTYTAERFIWLTKLNNLRILEQGSERPLTDTERATLMDEPYRKSKLTYAQARKLLGLEDTAFFKGLRYGKDNAEASTLMEMKAYHAISRALEKEGLKDKKSPLNLSSELQDEIGTAFSLFKTDEDITGRLKDRVQPEILEALLKHISFDKFVQISLKALRRIVPLMEQGKRYDEACAEIYGDHYGKKNTEEKIYLPPIPADEIRNPVVLRALSQARKVINGVVRRYGSPARIHIETAREVGKSFKDRKEIEKRQEENRKDREKAAAKFREYFPNFVGEPKSKDILKLRLYEQQHGKCLYSGKEINLVRLNEKGYVEIDHALPFSRTWDDSFNNKVLVLGSENQNKGNQTPYEYFNGKDNSREWQEFKARVETSRFPRSKKQRILLQKFDEDGFKECNLNDTRYVNRFLCQFVADHILLTGKGKRRVFASNGQITNLLRGFWGLRKVRAENDRHHALDAVVVACSTVAMQQKITRFVRYKEMNAFDGKTIDKETGKVLHQKTHFPQPWEFFAQEVMIRVFGKPDGKPEFEEADTPEKLRTLLAEKLSSRPEAVHEYVTPLFVSRAPNRKMSGAHKDTLRSAKRFVKHNEKISVKRVWLTEIKLADLENMVNYKNGREIELYEALKARLEAYGGNAKQAFDPKDNPFYKKGGQLVKAVRVEKTQESGVLLNKKNAYTIADNGDMVRVDVFCKVDKKGKNQYFIVPIYAWQVAENILPDIDCKGYRIDDSYTFCFSLHKYDLIAFQKDEKSKVEFAYYINCDSSNGRFYLAWHDKGSKEQQFRISTQNLVLIQKYQVNELGKEIRPCRLKKRPPVRSGKRTADGSEFESPKKKRKVE

SEQ ID NO: 621 - RNA, 3684 nt, synthetic construct
  misc_feature 1..3684: note = Synthetic
  source 1..3684: mol_type = other RNA
gggaagctcagaataaacgctcaactttggccggatctgccaccatgaccggtgccgccttcaagcccaaccccatcaactacatcctgggcctggacatcggcatcgcctccgtgggctgggccatggtggagatcgacgaggaggagaaccccatccggctgatcgacctgggcgtgcgggtgttcgagcgggccgaggtgcccaagaccggcgactccctggccatggcccggcggctggcccggtccgtgcggcggctgacccggcggcgggcccaccggctgctgcgggcccggcggctgctgaagcgggagggcgtgctgcaggccgccgacttcgacgagaacggcctgatcaagtccctgcccaacaccccctggcagctgcgggccgccgccctggaccggaagctgacccccctggagtggtccgccgtgctgctgcacctgatcaagcaccggggctacctgtcccagcggaagaacgagggcgagaccgccgacaaggagctgggcgccctgctgaagggcgtggccaacaacgcccacgccctgcagaccggcgacttccggacccccgccgagctggccctgaacaagttcgagaaggagtccggccacatccggaaccagcggggcgactactcccacaccttctcccggaaggacctgcaggccgagctgatcctgctgttcgagaagcagaaggagttcggcaacccccacgtgtccggcggcctgaaggagggcatcgagaccctgctgatgacccagcggcccgccctgtccggcgacgccgtgcagaagatgctgggccactgcaccttcgagcccgccgagcccaaggccgccaagaacacctacaccgccgagcggttcatctggctgaccaagctgaacaacctgcggatcctggagcagggctccgagcggcccctgaccgacaccgagcgggccaccctgatggacgagccctaccggaagtccaagctgacctacgcccaggcccggaagctgctgggcctggaggacaccgccttcttcaagggcctgcggtacggcaaggacaacgccgaggcctccaccctgatggagatgaaggcctaccacgccatctcccgggccctggagaaggagggcctgaaggacaagaagtcccccctgaacctgtcctccgagctgcaggacgagatcggcaccgccttctccctgttcaagaccgacgaggacatcaccggccggctgaaggaccgggtgcagcccgagatcctggaggccctgctgaagcacatctccttcgacaagttcgtgcagatctccctgaaggccctgcggcggatcgtgcccctgatggagcagggcaagcggtacgacgaggcctgcgccgagatctacggcgaccactacggcaagaagaacaccgaggagaagatctacctgccccccatccccgccgacgagatccggaaccccgtggtgctgcgggccctgtcccaggcccggaaggtgatcaacggcgtggtgcggcggtacggctcccccgcccggatccacatcgagaccgcccgggaggtgggcaagtccttcaaggaccggaaggagatcgagaagcggcaggaggagaaccggaaggaccgggagaaggccgccgccaagttccgggagtacttccccaacttcgtgggcgagcccaagtccaaggacatcctgaagctgcggctgtacgagcagcagcacggcaagtgcctgtactccggcaaggagatcaacctggtgcggctgaacgagaagggctacgtggagatcgaccacgccctgcccttctcccggacctgggacgactccttcaacaacaaggtgctggtgctgggctccgagaaccagaacaagggcaaccagaccccctacgagtacttcaacggcaaggacaactcccgggagtggcaggagttcaaggcccgggtggagacctcccggttcccccggtccaagaagcagcggatcctgctgcagaagttcgacgaggacggcttcaaggagtgcaacctgaacgacacccggtacgtgaaccgcttcctgtgccagttcgtggccgaccacatcctgctgaccggcaagggcaagcggcgggtgttcgcctccaacggccagatcaccaacctgctgcggggcttctggggcctgcggaaggtgcgggccgagaacgaccggcaccacgccctggacgccgtggtggtggcctgctccaccgtggccatgcagcagaagatcacccggttcgtgcggtacaaggagatgaacgccttcgacggcaagaccatcgacaaggagaccggcaaggtgctgcaccagaagacccacttcccccagccctgggagttcttcgcccaggaggtgatgatccgggtgttcggcaagcccgacggcaagcccgagttcgaggaggccgacacccccgagaagctgcggaccctgctggccgagaagctgtcctcccggcccgaggccgtgcacgagtacgtgacccccctgttcgtgtcccgggcccccaaccggaagatgtccggcgcccacaaggacaccctgcggtccgccaagcggttcgtgaagcacaacgagaagatctccgtgaagcgggtgtggctgaccgagatcaagctggccgacctggagaacatggtgaactacaagaacggccgggagatcgagctgtacgaggccctgaaggcccggctggaggcctacggcggcaacgccaagcaggccttcgaccccaaggacaaccccttctacaagaagggcggccagctggtgaaggccgtgcgggtggagaagacccaggagtccggcgtgctgctgaacaagaagaacgcctacaccatcgccgacaacggcgacatggtgcgggtggacgtgttctgcaaggtggacaagaagggcaagaaccagtacttcatcgtgcccatctacgcctggcaggtggccgagaacatcctgcccgacatcgactgcaagggctaccggatcgacgactcctacaccttctgcttctccctgcacaagtacgacctgatcgccttccagaaggacgagaagtccaaggtggagttcgcctactacatcaactgcgactcctccaacggccggttctacctggcctggcacgacaagggctccaaggagcagcagttccggatctccacccagaacctggtgctgatccagaagtaccaggtgaacgagctgggcaaggagatccggccctgccggctgaagaagcggccccccgtgcggtccggaaagcggaccgccgacggctccgagttcgagtcccccaagaagaagcggaaggtggagtagctagcaccagcctcaagaacacccgaatggagtctctaagctacataataccaacttacactttacaaaatgttgtcccccaaaatgtagccattcgtatctgctcctaataaaaagaaagtttcttcacattctctcgagaaaaaaaaaaaatggaaaaaaaaaaaacggaaaaaaaaaaaaggtaaaaaaaaaaaatataaaaaaaaaaaacataaaaaaaaaaaacgaaaaaaaaaaaacgtaaaaaaaaaaaactcaaaaaaaaaaaagataaaaaaaaaaaacctaaaaaaaaaaaatgtaaaaaaaaaaaatctag

SEQ ID NO: 622 - RNA, 3837 nt, synthetic construct
  misc_feature 1..3837: note = Synthetic
  source 1..3837: mol_type = other RNA
gggaagctcagaataaacgctcaactttggccggatctgccaccatgaccggtgccgccttcaagcccaaccccatcaactacatcctgggcctggacatcggcatcgcctccgtgggctgggccatggtggagatcgacgaggaggagaaccccatccggctgatcgacctgggcgtgcgggtgttcgagcgggccgaggtgcccaagaccggcgactccctggccatggcccggcggctggcccggtccgtgcggcggctgacccggcggcgggcccaccggctgctgcgggcccggcggctgctgaagcgggagggcgtgctgcaggccgccgacttcgacgagaacggcctgatcaagtccctgcccaacaccccctggcagctgcgggccgccgccctggaccggaagctgacccccctggagtggtccgccgtgctgctgcacctgatcaagcaccggggctacctgtcccagcggaagaacgagggcgagaccgccgacaaggagctgggcgccctgctgaagggcgtggccaacaacgcccacgccctgcagaccggcgacttccggacccccgccgagctggccctgaacaagttcgagaaggagtccggccacatccggaaccagcggggcgactactcccacaccttctcccggaaggacctgcaggccgagctgatcctgctgttcgagaagcagaaggagttcggcaacccccacgtgtccggcggcctgaaggagggcatcgagaccctgctgatgacccagcggcccgccctgtccggcgacgccgtgcagaagatgctgggccactgcaccttcgagcccgccgagcccaaggccgccaagaacacctacaccgccgagcggttcatctggctgaccaagctgaacaacctgcggatcctggagcagggctccgagcggcccctgaccgacaccgagcgggccaccctgatggacgagccctaccggaagtccaagctgacctacgcccaggcccggaagctgctgggcctggaggacaccgccttcttcaagggcctgcggtacggcaaggacaacgccgaggcctccaccctgatggagatgaaggcctaccacgccatctcccgggccctggagaaggagggcctgaaggacaagaagtcccccctgaacctgtcctccgagctgcaggacgagatcggcaccgccttctccctgttcaagaccgacgaggacatcaccggccggctgaaggaccgggtgcagcccgagatcctggaggccctgctgaagcacatctccttcgacaagttcgtgcagatctccctgaaggccctgcggcggatcgtgcccctgatggagcagggcaagcggtacgacgaggcctgcgccgagatctacggcgaccactacggcaagaagaacaccgaggagaagatctacctgccccccatccccgccgacgagatccggaaccccgtggtgctgcgggccctgtcccaggcccggaaggtgatcaacggcgtggtgcggcggtacggctcccccgcccggatccacatcgagaccgcccgggaggtgggcaagtccttcaaggaccggaaggagatcgagaagcggcaggaggagaaccggaaggaccgggagaaggccgccgccaagttccgggagtacttccccaacttcgtgggcgagcccaagtccaaggacatcctgaagctgcggctgtacgagcagcagcacggcaagtgcctgtactccggcaaggagatcaacctggtgcggctgaacgagaagggctacgtggagatcgaccacgccctgcccttctcccggacctgggacgactccttcaacaacaaggtgctggtgctgggctccgagaaccagaacaagggcaaccagaccccctacgagtacttcaacggcaaggacaactcccgggagtggcaggagttcaaggcccgggtggagacctcccggttcccccggtccaagaagcagcggatcctgctgcagaagttcgacgaggacggcttcaaggagtgcaacctgaacgacacccggtacgtgaaccgcttcctgtgccagttcgtggccgaccacatcctgctgaccggcaagggcaagcggcgggtgttcgcctccaacggccagatcaccaacctgctgcggggcttctggggcctgcggaaggtgcgggccgagaacgaccggcaccacgccctggacgccgtggtggtggcctgctccaccgtggccatgcagcagaagatcacccggttcgtgcggtacaaggagatgaacgccttcgacggcaagaccatcgacaaggagaccggcaaggtgctgcaccagaagacccacttcccccagccctgggagttcttcgcccaggaggtgatgatccgggtgttcggcaagcccgacggcaagcccgagttcgaggaggccgacacccccgagaagctgcggaccctgctggccgagaagctgtcctcccggcccgaggccgtgcacgagtacgtgacccccctgttcgtgtcccgggcccccaaccggaagatgtccggcgcccacaaggacaccctgcggtccgccaagcggttcgtgaagcacaacgagaagatctccgtgaagcgggtgtggctgaccgagatcaagctggccgacctggagaacatggtgaactacaagaacggccgggagatcgagctgtacgaggccctgaaggcccggctggaggcctacggcggcaacgccaagcaggccttcgaccccaaggacaaccccttctacaagaagggcggccagctggtgaaggccgtgcgggtggagaagacccaggagtccggcgtgctgctgaacaagaagaacgcctacaccatcgccgacaacggcgacatggtgcgggtggacgtgttctgcaaggtggacaagaagggcaagaaccagtacttcatcgtgcccatctacgcctggcaggtggccgagaacatcctgcccgacatcgactgcaagggctaccggatcgacgactcctacaccttctgcttctccctgcacaagtacgacctgatcgccttccagaaggacgagaagtccaaggtggagttcgcctactacatcaactgcgactcctccaacggccggttctacctggcctggcacgacaagggctccaaggagcagcagttccggatctccacccagaacctggtgctgatccagaagtaccaggtgaacgagctgggcaaggagatccggccctgccggctgaagaagcggccccccgtgcggtccggaaagcggaccgccgacggctccgagttcgagtcccccaagaagaagcggaaggtggagtagctagcaccagcctcaagaacacccgaatggagtctctaagctacataataccaacttacactttacaaaatgttgtcccccaaaatgtagccattcgtatctgctcctaataaaaagaaagtttcttcacattctctcgagaaaaaaaaaaaatggaaaaaaaaaaaacggaaaaaaaaaaaaggtaaaaaaaaaaaatataaaaaaaaaaaacataaaaaaaaaaaacgaaaaaaaaaaaacgtaaaaaaaaaaaactcaaaaaaaaaaaagataaaaaaaaaaaacctaaaaaaaaaaaatgtaaaaaaaaaaaagggaaaaaaaaaaaacgcaaaaaaaaaaaacacaaaaaaaaaaaatgcaaaaaaaaaaaatcgaaaaaaaaaaaatctaaaaaaaaaaaacgaaaaaaaaaaaacccaaaaaaaaaaaagacaaaaaaaaaaaatagaaaaaaaaaaaagttaaaaaa

SEQ ID NO: 623 - RNA, 3601 nt, synthetic construct
  misc_feature 1..3601: note = Synthetic
  source 1..3601: mol_type = other RNA
gggaagctcagaataaacgctcaactttggccggatctgccaccatgaccggtgccgccttcaagcccaaccccatcaactacatcctgggcctggacatcggcatcgcctccgtgggctgggccatggtggagatcgacgaggaggagaaccccatccggctgatcgacctgggcgtgcgggtgttcgagcgggccgaggtgcccaagaccggcgactccctggccatggcccggcggctggcccggtccgtgcggcggctgacccggcggcgggcccaccggctgctgcgggcccggcggctgctgaagcgggagggcgtgctgcaggccgccgacttcgacgagaacggcctgatcaagtccctgcccaacaccccctggcagctgcgggccgccgccctggaccggaagctgacccccctggagtggtccgccgtgctgctgcacctgatcaagcaccggggctacctgtcccagcggaagaacgagggcgagaccgccgacaaggagctgggcgccctgctgaagggcgtggccaacaacgcccacgccctgcagaccggcgacttccggacccccgccgagctggccctgaacaagttcgagaaggagtccggccacatccggaaccagcggggcgactactcccacaccttctcccggaaggacctgcaggccgagctgatcctgctgttcgagaagcagaaggagttcggcaacccccacgtgtccggcggcctgaaggagggcatcgagaccctgctgatgacccagcggcccgccctgtccggcgacgccgtgcagaagatgctgggccactgcaccttcgagcccgccgagcccaaggccgccaagaacacctacaccgccgagcggttcatctggctgaccaagctgaacaacctgcggatcctggagcagggctccgagcggcccctgaccgacaccgagcgggccaccctgatggacgagccctaccggaagtccaagctgacctacgcccaggcccggaagctgctgggcctggaggacaccgccttcttcaagggcctgcggtacggcaaggacaacgccgaggcctccaccctgatggagatgaaggcctaccacgccatctcccgggccctggagaaggagggcctgaaggacaagaagtcccccctgaacctgtcctccgagctgcaggacgagatcggcaccgccttctccctgttcaagaccgacgaggacatcaccggccggctgaaggaccgggtgcagcccgagatcctggaggccctgctgaagcacatctccttcgacaagttcgtgcagatctccctgaaggccctgcggcggatcgtgcccctgatggagcagggcaagcggtacgacgaggcctgcgccgagatctacggcgaccactacggcaagaagaacaccgaggagaagatctacctgccccccatccccgccgacgagatccggaaccccgtggtgctgcgggccctgtcccaggcccggaaggtgatcaacggcgtggtgcggcggtacggctcccccgcccggatccacatcgagaccgcccgggaggtgggcaagtccttcaaggaccggaaggagatcgagaagcggcaggaggagaaccggaaggaccgggagaaggccgccgccaagttccgggagtacttccccaacttcgtgggcgagcccaagtccaaggacatcctgaagctgcggctgtacgagcagcagcacggcaagtgcctgtactccggcaaggagatcaacctggtgcggctgaacgagaagggctacgtggagatcgaccacgccctgcccttctcccggacctgggacgactccttcaacaacaaggtgctggtgctgggctccgagaaccagaacaagggcaaccagaccccctacgagtacttcaacggcaaggacaactcccgggagtggcaggagttcaaggcccgggtggagacctcccggttcccccggtccaagaagcagcggatcctgctgcagaagttcgacgaggacggcttcaaggagtgcaacctgaacgacacccggtacgtgaaccgcttcctgtgccagttcgtggccgaccacatcctgctgaccggcaagggcaagcggcgggtgttcgcctccaacggccagatcaccaacctgctgcggggcttctggggcctgcggaaggtgcgggccgagaacgaccggcaccacgccctggacgccgtggtggtggcctgctccaccgtggccatgcagcagaagatcacccggttcgtgcggtacaaggagatgaacgccttcgacggcaagaccatcgacaaggagaccggcaaggtgctgcaccagaagacccacttcccccagccctgggagttcttcgcccaggaggtgatgatccgggtgttcggcaagcccgacggcaagcccgagttcgaggaggccgacacccccgagaagctgcggaccctgctggccgagaagctgtcctcccggcccgaggccgtgcacgagtacgtgacccccctgttcgtgtcccgggcccccaaccggaagatgtccggcgcccacaaggacaccctgcggtccgccaagcggttcgtgaagcacaacgagaagatctccgtgaagcgggtgtggctgaccgagatcaagctggccgacctggagaacatggtgaactacaagaacggccgggagatcgagctgtacgaggccctgaaggcccggctggaggcctacggcggcaacgccaagcaggccttcgaccccaaggacaaccccttctacaagaagggcggccagctggtgaaggccgtgcgggtggagaagacccaggagtccggcgtgctgctgaacaagaagaacgcctacaccatcgccgacaacggcgacatggtgcgggtggacgtgttctgcaaggtggacaagaagggcaagaaccagtacttcatcgtgcccatctacgcctggcaggtggccgagaacatcctgcccgacatcgactgcaagggctaccggatcgacgactcctacaccttctgcttctccctgcacaagtacgacctgatcgccttccagaaggacgagaagtccaaggtggagttcgcctactacatcaactgcgactcctccaacggccggttctacctggcctggcacgacaagggctccaaggagcagcagttccggatctccacccagaacctggtgctgatccagaagtaccaggtgaacgagctgggcaaggagatccggccctgccggctgaagaagcggccccccgtgcggtccggaaagcggaccgccgacggctccgagttcgagtcccccaagaagaagcggaaggtggagtagctagcaccagcctcaagaacacccgaatggagtctctaagctacataataccaacttacactttacaaaatgttgtcccccaaaatgtagccattcgtatctgctcctaataaaaagaaagtttcttcacattctctcgagaaaaaaaaaaaaaaaaaaaaaaaaaaaaaaaaaaaaaaaaaaaaaaaaaaaaaaaaaaaaaaaaaaaaaaaaaaaaaaaaaaaaaaaaaaaaatctag

SEQ ID NO: 624 - RNA, 5342 nt, synthetic construct
  misc_feature 1..5342: note = Synthetic
  source 1..5342: mol_type = other RNA
gggaagctcagaataaacgctcaactttggccggatctgccaccatggaggcctcccccgcctccggcccccggcacctgatggacccccacatcttcacctccaacttcaacaacggcatcggccggcacaagacctacctgtgctacgaggtggagcggctggacaacggcacctccgtgaagatggaccagcaccggggcttcctgcacaaccaggccaagaacctgctgtgcggcttctacggccggcacgccgagctgcggttcctggacctggtgccctccctgcagctggaccccgcccagatctaccgggtgacctggttcatctcctggtccccctgcttctcctggggctgcgccggcgaggtgcgggccttcctgcaggagaacacccacgtgcggctgcggatcttcgccgcccggatctacgactacgaccccctgtacaaggaggccctgcagatgctgcgggacgccggcgcccaggtgtccatcatgacctacgacgagttcaagcactgctgggacaccttcgtggaccaccagggctgccccttccagccctgggacggcctggacgagcactcccaggccctgtccggccggctgcgggccatcctgcagaaccagggcaactccggctccgagacccccggcacctccgagtccgccacccccgagtccgacaagaagtactccatcggcctggccatcggcaccaactccgtgggctgggccgtgatcaccgacgagtacaaggtgccctccaagaagttcaaggtgctgggcaacaccgaccggcactccatcaagaagaacctgatcggcgccctgctgttcgactccggcgagaccgccgaggccacccggctgaagcggaccgcccggcggcggtacacccggcggaagaaccggatctgctacctgcaggagatcttctccaacgagatggccaaggtggacgactccttcttccaccggctggaggagtccttcctggtggaggaggacaagaagcacgagcggcaccccatcttcggcaacatcgtggacgaggtggcctaccacgagaagtaccccaccatctaccacctgcggaagaagctggtggactccaccgacaaggccgacctgcggctgatctacctggccctggcccacatgatcaagttccggggccacttcctgatcgagggcgacctgaaccccgacaactccgacgtggacaagctgttcatccagctggtgcagacctacaaccagctgttcgaggagaaccccatcaacgcctccggcgtggacgccaaggccatcctgtccgcccggctgtccaagtcccggcggctggagaacctgatcgcccagctgcccggcgagaagaagaacggcctgttcggcaacctgatcgccctgtccctgggcctgacccccaacttcaagtccaacttcgacctggccgaggacgccaagctgcagctgtccaaggacacctacgacgacgacctggacaacctgctggcccagatcggcgaccagtacgccgacctgttcctggccgccaagaacctgtccgacgccatcctgctgtccgacatcctgcgggtgaacaccgagatcaccaaggcccccctgtccgcctccatgatcaagcggtacgacgagcaccaccaggacctgaccctgctgaaggccctggtgcggcagcagctgcccgagaagtacaaggagatcttcttcgaccagtccaagaacggctacgccggctacatcgacggcggcgcctcccaggaggagttctacaagttcatcaagcccatcctggagaagatggacggcaccgaggagctgctggtgaagctgaaccgggaggacctgctgcggaagcagcggaccttcgacaacggctccatcccccaccagatccacctgggcgagctgcacgccatcctgcggcggcaggaggacttctaccccttcctgaaggacaaccgggagaagatcgagaagatcctgaccttccggatcccctactacgtgggccccctggcccggggcaactcccggttcgcctggatgacccggaagtccgaggagaccatcaccccctggaacttcgaggaggtggtggacaagggcgcctccgcccagtccttcatcgagcggatgaccaacttcgacaagaacctgcccaacgagaaggtgctgcccaagcactccctgctgtacgagtacttcaccgtgtacaacgagctgaccaaggtgaagtacgtgaccgagggcatgcggaagcccgccttcctgtccggcgagcagaagaaggccatcgtggacctgctgttcaagaccaaccggaaggtgaccgtgaagcagctgaaggaggactacttcaagaagatcgagtgcttcgactccgtggagatctccggcgtggaggaccggttcaacgcctccctgggcacctaccacgacctgctgaagatcatcaaggacaaggacttcctggacaacgaggagaacgaggacatcctggaggacatcgtgctgaccctgaccctgttcgaggaccgggagatgatcgaggagcggctgaagacctacgcccacctgttcgacgacaaggtgatgaagcagctgaagcggcggcggtacaccggctggggccggctgtcccggaagctgatcaacggcatccgggacaagcagtccggcaagaccatcctggacttcctgaagtccgacggcttcgccaaccggaacttcatgcagctgatccacgacgactccctgaccttcaaggaggacatccagaaggcccaggtgtccggccagggcgactccctgcacgagcacatcgccaacctggccggctcccccgccatcaagaagggcatcctgcagaccgtgaaggtggtggacgagctggtgaaggtgatgggccggcacaagcccgagaacatcgtgatcgagatggcccgggagaaccagaccacccagaagggccagaagaactcccgggagcggatgaagcggatcgaggagggcatcaaggagctgggctcccagatcctgaaggagcaccccgtggagaacacccagctgcagaacgagaagctgtacctgtactacctgcagaacggccgggacatgtacgtggaccaggagctggacatcaaccggctgtccgactacgacgtggaccacatcgtgccccagtccttcctgaaggacgactccatcgacaacaaggtgctgacccggtccgacaagaaccggggcaagtccgacaacgtgccctccgaggaggtggtgaagaagatgaagaactactggcggcagctgctgaacgccaagctgatcacccagcggaagttcgacaacctgaccaaggccgagcggggcggcctgtccgagctggacaaggccggcttcatcaagcggcagctggtggagacccggcagatcaccaagcacgtggcccagatcctggactcccggatgaacaccaagtacgacgagaacgacaagctgatccgggaggtgaaggtgatcaccctgaagtccaagctggtgtccgacttccggaaggacttccagttctacaaggtgcgggagatcaacaactaccaccacgcccacgacgcctacctgaacgccgtggtgggcaccgccctgatcaagaagtaccccaagctggagtccgagttcgtgtacggcgactacaaggtgtacgacgtgcggaagatgatcgccaagtccgagcaggagatcggcaaggccaccgccaagtacttcttctactccaacatcatgaacttcttcaagaccgagatcaccctggccaacggcgagatccggaagcggcccctgatcgagaccaacggcgagaccggcgagatcgtgtgggacaagggccgggacttcgccaccgtgcggaaggtgctgtccatgccccaggtgaacatcgtgaagaagaccgaggtgcagaccggcggcttctccaaggagtccatcctgcccaagcggaactccgacaagctgatcgcccggaagaaggactgggaccccaagaagtacggcggcttcgactcccccaccgtggcctactccgtgctggtggtggccaaggtggagaagggcaagtccaagaagctgaagtccgtgaaggagctgctgggcatcaccatcatggagcggtcctccttcgagaagaaccccatcgacttcctggaggccaagggctacaaggaggtgaagaaggacctgatcatcaagctgcccaagtactccctgttcgagctggagaacggccggaagcggatgctggcctccgccggcgagctgcagaagggcaacgagctggccctgccctccaagtacgtgaacttcctgtacctggcctcccactacgagaagctgaagggctcccccgaggacaacgagcagaagcagctgttcgtggagcagcacaagcactacctggacgagatcatcgagcagatctccgagttctccaagcgggtgatcctggccgacgccaacctggacaaggtgctgtccgcctacaacaagcaccgggacaagcccatccgggagcaggccgagaacatcatccacctgttcaccctgaccaacctgggcgcccccgccgccttcaagtacttcgacaccaccatcgaccggaagcggtacacctccaccaaggaggtgctggacgccaccctgatccaccagtccatcaccggcctgtacgagacccggatcgacctgtcccagctgggcggcgacggcggcggctcccccaagaagaagcggaaggtgtgactagcaccagcctcaagaacacccgaatggagtctctaagctacataataccaacttacactttacaaaatgttgtcccccaaaatgtagccattcgtatctgctcctaataaaaagaaagtttcttcacattctctcgagaaaaaaaaaaaatggaaaaaaaaaaaacggaaaaaaaaaaaaggtaaaaaaaaaaaatataaaaaaaaaaaacataaaaaaaaaaaacgaaaaaaaaaaaacgtaaaaaaaaaaaactcaaaaaaaaaaaagataaaaaaaaaaaacctaaaaaaaaaaaatgtaaaaaaaaaaaagggaaaaaaaaaaaacgcaaaaaaaaaaaacacaaaaaaaaaaaatgcaaaaaaaaaaaatcgaaaaaaaaaaaatctaaaaaaaaaaaacgaaaaaaaaaaaacccaaaaaaaaaaaagacaaaaaaaaaaaatagaaaaaaaaaaaagttaaaaaaaaaaaactgaaaaaaaaaaaatttaaaaaaaaaaaatctag

SEQ ID NO: 625 - RNA, 887 nt, synthetic construct
  misc_feature 1..887: note = Synthetic
  source 1..887: mol_type = other RNA
gggaagctcagaataaacgctcaactttggccggatctgccaccatgaccaacctgtccgacatcatcgagaaggagaccggcaagcagctggtgatccaggagtccatcctgatgctgcccgaggaggtggaggaggtgatcggcaacaagcccgagtccgacatcctggtgcacaccgcctacgacgagtccaccgacgagaacgtgatgctgctgacctccgacgcccccgagtacaagccctgggccctggtgatccaggactccaacggcgagaacaagatcaagatgctgtccggcggctccaagcggaccgccgacggctccgagttcgagtcccccaagaagaagcggaaggtggagtgatagctagcaccagcctcaagaacacccgaatggagtctctaagctacataataccaacttacactttacaaaatgttgtcccccaaaatgtagccattcgtatctgctcctaataaaaagaaagtttcttcacattctctcgagaaaaaaaaaaaatggaaaaaaaaaaaacggaaaaaaaaaaaaggtaaaaaaaaaaaatataaaaaaaaaaaacataaaaaaaaaaaacgaaaaaaaaaaaacgtaaaaaaaaaaaactcaaaaaaaaaaaagataaaaaaaaaaaacctaaaaaaaaaaaatgtaaaaaaaaaaaagggaaaaaaaaaaaacgcaaaaaaaaaaaacacaaaaaaaaaaaatgcaaaaaaaaaaaatcgaaaaaaaaaaaatctaaaaaaaaaaaacgaaaaaaaaaaaacccaaaaaaaaaaaagacaaaaaaaaaaaatagaaaaaaaaaaaagttaaaaaaaaaaaactgaaaaaaaaaaaatttaaaaaaaaaaaatctag

SEQ ID NO: 626 - DNA, 3850 bp, synthetic construct
  misc_feature 1..3850: note = Synthetic
  source 1..3850: mol_type = other DNA
gggaagctcagaataaacgctcaactttggccggatctgccaccatggccgccttcaagcccaaccccatcaactacatcctgggcctggacatcggcatcgcctccgtgggctgggccatggtggagatcgacgaggaggagaaccccatccggctgatcgacctgggcgtgcgggtgttcgagcgggccgaggtgcccaagaccggcgactccctggccatggcccggcggctggcccggtccgtgcggcggctgacccggcggcgggcccaccggctgctgcgggcccggcggctgctgaagcgggagggcgtgctgcaggccgccgacttcgacgagaacggcctgatcaagtccctgcccaacaccccctggcagctgcgggccgccgccctggaccggaagctgacccccctggagtggtccgccgtgctgctgcacctgatcaagcaccggggctacctgtcccagcggaagaacgagggcgagaccgccgacaaggagctgggcgccctgctgaagggcgtggccaacaacgcccacgccctgcagaccggcgacttccggacccccgccgagctggccctgaacaagttcgagaaggagtccggccacatccggaaccagcggggcgactactcccacaccttctcccggaaggacctgcaggccgagctgatcctgctgttcgagaagcagaaggagttcggcaacccccacgtgtccggcggcctgaaggagggcatcgagaccctgctgatgacccagcggcccgccctgtccggcgacgccgtgcagaagatgctgggccactgcaccttcgagcccgccgagcccaaggccgccaagaacacctacaccgccgagcggttcatctggctgaccaagctgaacaacctgcggatcctggagcagggctccgagcggcccctgaccgacaccgagcgggccaccctgatggacgagccctaccggaagtccaagctgacctacgcccaggcccggaagctgctgggcctggaggacaccgccttcttcaagggcctgcggtacggcaaggacaacgccgaggcctccaccctgatggagatgaaggcctaccacgccatctcccgggccctggagaaggagggcctgaaggacaagaagtcccccctgaacctgtcctccgagctgcaggacgagatcggcaccgccttctccctgttcaagaccgacgaggacatcaccggccggctgaaggaccgggtgcagcccgagatcctggaggccctgctgaagcacatctccttcgacaagttcgtgcagatctccctgaaggccctgcggcggatcgtgcccctgatggagcagggcaagcggtacgacgaggcctgcgccgagatctacggcgaccactacggcaagaagaacaccgaggagaagatctacctgccccccatccccgccgacgagatccggaaccccgtggtgctgcgggccctgtcccaggcccggaaggtgatcaacggcgtggtgcggcggtacggctcccccgcccggatccacatcgagaccgcccgggaggtgggcaagtccttcaaggaccggaaggagatcgagaagcggcaggaggagaaccggaaggaccgggagaaggccgccgccaagttccgggagtacttccccaacttcgtgggcgagcccaagtccaaggacatcctgaagctgcggctgtacgagcagcagcacggcaagtgcctgtactccggcaaggagatcaacctggtgcggctgaacgagaagggctacgtggagatcgaccacgccctgcccttctcccggacctgggacgactccttcaacaacaaggtgctggtgctgggctccgagaaccagaacaagggcaaccagaccccctacgagtacttcaacggcaaggacaactcccgggagtggcaggagttcaaggcccgggtggagacctcccggttcccccggtccaagaagcagcggatcctgctgcagaagttcgacgaggacggcttcaaggagtgcaacctgaacgacacccggtacgtgaaccggttcctgtgccagttcgtggccgaccacatcctgctgaccggcaagggcaagcggcgggtgttcgcctccaacggccagatcaccaacctgctgcggggcttctggggcctgcggaaggtgcgggccgagaacgaccggcaccacgccctggacgccgtggtggtggcctgctccaccgtggccatgcagcagaagatcacccggttcgtgcggtacaaggagatgaacgccttcgacggcaagaccatcgacaaggagaccggcaaggtgctgcaccagaagacccacttcccccagccctgggagttcttcgcccaggaggtgatgatccgggtgttcggcaagcccgacggcaagcccgagttcgaggaggccgacacccccgagaagctgcggaccctgctggccgagaagctgtcctcccggcccgaggccgtgcacgagtacgtgacccccctgttcgtgtcccgggcccccaaccggaagatgtccggcgcccacaaggacaccctgcggtccgccaagcggttcgtgaagcacaacgagaagatctccgtgaagcgggtgtggctgaccgagatcaagctggccgacctggagaacatggtgaactacaagaacggccgggagatcgagctgtacgaggccctgaaggcccggctggaggcctacggcggcaacgccaagcaggccttcgaccccaaggacaaccccttctacaagaagggcggccagctggtgaaggccgtgcgggtggagaagacccaggagtccggcgtgctgctgaacaagaagaacgcctacaccatcgccgacaacggcgacatggtgcgggtggacgtgttctgcaaggtggacaagtccggcggcggctcccccaagaagaagcggaaggtgtccggcggctccggcaagaaccagtacttcatcgtgcccatctacgcctggcaggtggccgagaacatcctgcccgacatcgactgcaagggctaccggatcgacgactcctacaccttctgcttctccctgcacaagtacgacctgatcgccttccagaaggacgagaagtccaaggtggagttcgcctactacatcaactgcgactcctccaacggccggttctacctggcctggcacgacaagggctccaaggagcagcagttccggatctccacccagaacctggtgctgatccagaagtaccaggtgaacgagctgggcaaggagatccggccctgccggctgaagaagcggccccccgtgcggtagctagcaccagcctcaagaacacccgaatggagtctctaagctacataataccaacttacactttacaaaatgttgtcccccaaaatgtagccattcgtatctgctcctaataaaaagaaagtttcttcacattctctcgagaaaaaaaaaaaatggaaaaaaaaaaaacggaaaaaaaaaaaaggtaaaaaaaaaaaatataaaaaaaaaaaacataaaaaaaaaaaacgaaaaaaaaaaaacgtaaaaaaaaaaaactcaaaaaaaaaaaagataaaaaaaaaaaacctaaaaaaaaaaaatgtaaaaaaaaaaaagggaaaaaaaaaaaacgcaaaaaaaaaaaacacaaaaaaaaaaaatgcaaaaaaaaaaaatcgaaaaaaaaaaaatctaaaaaaaaaaaacgaaaaaaaaaaaacccaaaaaaaaaaaagacaaaaaaaaaaaatagaaaaaaaaaaaagttaaaaaaaaaaaactgaaaaaaaaaaaatttaaaaaaaaaaaat

SEQ ID NO: 627 - DNA, 3889 bp, synthetic construct
  misc_feature 1..3889: note = Synthetic
  source 1..3889: mol_type = other DNA
gggaagctcagaataaacgctcaactttggccggatctgccaccatggtgcccaagaagaagcggaaggtggccgccttcaagcccaaccccatcaactacatcctgggcctggacatcggcatcgcctccgtgggctgggccatggtggagatcgacgaggaggagaaccccatccggctgatcgacctgggcgtgcgggtgttcgagcgggccgaggtgcccaagaccggcgactccctggccatggcccggcggctggcccggtccgtgcggcggctgacccggcggcgggcccaccggctgctgcgggcccggcggctgctgaagcgggagggcgtgctgcaggccgccgacttcgacgagaacggcctgatcaagtccctgcccaacaccccctggcagctgcgggccgccgccctggaccggaagctgacccccctggagtggtccgccgtgctgctgcacctgatcaagcaccggggctacctgtcccagcggaagaacgagggcgagaccgccgacaaggagctgggcgccctgctgaagggcgtggccaacaacgcccacgccctgcagaccggcgacttccggacccccgccgagctggccctgaacaagttcgagaaggagtccggccacatccggaaccagcggggcgactactcccacaccttctcccggaaggacctgcaggccgagctgatcctgctgttcgagaagcagaaggagttcggcaacccccacgtgtccggcggcctgaaggagggcatcgagaccctgctgatgacccagcggcccgccctgtccggcgacgccgtgcagaagatgctgggccactgcaccttcgagcccgccgagcccaaggccgccaagaacacctacaccgccgagcggttcatctggctgaccaagctgaacaacctgcggatcctggagcagggctccgagcggcccctgaccgacaccgagcgggccaccctgatggacgagccctaccggaagtccaagctgacctacgcccaggcccggaagctgctgggcctggaggacaccgccttcttcaagggcctgcggtacggcaaggacaacgccgaggcctccaccctgatggagatgaaggcctaccacgccatctcccgggccctggagaaggagggcctgaaggacaagaagtcccccctgaacctgtcctccgagctgcaggacgagatcggcaccgccttctccctgttcaagaccgacgaggacatcaccggccggctgaaggaccgggtgcagcccgagatcctggaggccctgctgaagcacatctccttcgacaagttcgtgcagatctccctgaaggccctgcggcggatcgtgcccctgatggagcagggcaagcggtacgacgaggcctgcgccgagatctacggcgaccactacggcaagaagaacaccgaggagaagatctacctgccccccatccccgccgacgagatccggaaccccgtggtgctgcgggccctgtcccaggcccggaaggtgatcaacggcgtggtgcggcggtacggctcccccgcccggatccacatcgagaccgcccgggaggtgggcaagtccttcaaggaccggaaggagatcgagaagcggcaggaggagaaccggaaggaccgggagaaggccgccgccaagttccgggagtacttccccaacttcgtgggcgagcccaagtccaaggacatcctgaagctgcggctgtacgagcagcagcacggcaagtgcctgtactccggcaaggagatcaacctggtgcggctgaacgagaagggctacgtggagatcgaccacgccctgcccttctcccggacctgggacgactccttcaacaacaaggtgctggtgctgggctccgagaaccagaacaagggcaaccagaccccctacgagtacttcaacggcaaggacaactcccgggagtggcaggagttcaaggcccgggtggagacctcccggttcccccggtccaagaagcagcggatcctgctgcagaagttcgacgaggacggcttcaaggagtgcaacctgaacgacacccggtacgtgaaccggttcctgtgccagttcgtggccgaccacatcctgctgaccggcaagggcaagcggcgggtgttcgcctccaacggccagatcaccaacctgctgcggggcttctggggcctgcggaaggtgcgggccgagaacgaccggcaccacgccctggacgccgtggtggtggcctgctccaccgtggccatgcagcagaagatcacccggttcgtgcggtacaaggagatgaacgccttcgacggcaagaccatcgacaaggagaccggcaaggtgctgcaccagaagacccacttcccccagccctgggagttcttcgcccaggaggtgatgatccgggtgttcggcaagcccgacggcaagcccgagttcgaggaggccgacacccccgagaagctgcggaccctgctggccgagaagctgtcctcccggcccgaggccgtgcacgagtacgtgacccccctgttcgtgtcccgggcccccaaccggaagatgtccggcgcccacaaggacaccctgcggtccgccaagcggttcgtgaagcacaacgagaagatctccgtgaagcgggtgtggctgaccgagatcaagctggccgacctggagaacatggtgaactacaagaacggccgggagatcgagctgtacgaggccctgaaggcccggctggaggcctacggcggcaacgccaagcaggccttcgaccccaaggacaaccccttctacaagaagggcggccagctggtgaaggccgtgcgggtggagaagacccaggagtccggcgtgctgctgaacaagaagaacgcctacaccatcgccgacaacggcgacatggtgcgggtggacgtgttctgcaaggtggacaagaagggcaagaaccagtacttcatcgtgcccatctacgcctggcaggtggccgagaacatcctgcccgacatcgactgcaagggctaccggatcgacgactcctacaccttctgcttctccctgcacaagtacgacctgatcgccttccagaaggacgagaagtccaaggtggagttcgcctactacatcaactgcgactcctccaacggccggttctacctggcctggcacgacaagggctccaaggagcagcagttccggatctccacccagaacctggtgctgatccagaagtaccaggtgaacgagctgggcaaggagatccggccctgccggctgaagaagcggccccccgtgcggtacccctacgacgtgcccgactacgccgccgcccccgccgccaagaagaagaagctggactagctagcaccagcctcaagaacacccgaatggagtctctaagctacataataccaacttacactttacaaaatgttgtcccccaaaatgtagccattcgtatctgctcctaataaaaagaaagtttcttcacattctctcgagaaaaaaaaaaaatggaaaaaaaaaaaacggaaaaaaaaaaaaggtaaaaaaaaaaaatataaaaaaaaaaaacataaaaaaaaaaaacgaaaaaaaaaaaacgtaaaaaaaaaaaactcaaaaaaaaaaaagataaaaaaaaaaaacctaaaaaaaaaaaatgtaaaaaaaaaaaagggaaaaaaaaaaaacgcaaaaaaaaaaaacacaaaaaaaaaaaatgcaaaaaaaaaaaatcgaaaaaaaaaaaatctaaaaaaaaaaaacgaaaaaaaaaaaacccaaaaaaaaaaaagacaaaaaaaaaaaatagaaaaaaaaaaaagttaaaaaaaaaaaactgaaaaaaaaaaaatttaaaaaaaaaaaat

SEQ ID NO: 628 - RNA, 4067 nt, synthetic construct
  misc_feature 1..4067: note = Synthetic
  source 1..4067: mol_type = other RNA
gggaagctcagaataaacgctcaactttggccggatctgccaccatggtgcccaagaagaagcggaaggtggaggacaagcggcccgccgccaccaagaaggccggccaggccaagaagaagaagatggccgccttcaagcccaaccccatcaactacatcctgggcctggacatcggcatcgcctccgtgggctgggccatggtggagatcgacgaggaggagaaccccatccggctgatcgacctgggcgtgcgggtgttcgagcgggccgaggtgcccaagaccggcgactccctggccatggcccggcggctggcccggtccgtgcggcggctgacccggcggcgggcccaccggctgctgcgggcccggcggctgctgaagcgggagggcgtgctgcaggccgccgacttcgacgagaacggcctgatcaagtccctgcccaacaccccctggcagctgcgggccgccgccctggaccggaagctgacccccctggagtggtccgccgtgctgctgcacctgatcaagcaccggggctacctgtcccagcggaagaacgagggcgagaccgccgacaaggagctgggcgccctgctgaagggcgtggccaacaacgcccacgccctgcagaccggcgacttccggacccccgccgagctggccctgaacaagttcgagaaggagtccggccacatccggaaccagcggggcgactactcccacaccttctcccggaaggacctgcaggccgagctgatcctgctgttcgagaagcagaaggagttcggcaacccccacgtgtccggcggcctgaaggagggcatcgagaccctgctgatgacccagcggcccgccctgtccggcgacgccgtgcagaagatgctgggccactgcaccttcgagcccgccgagcccaaggccgccaagaacacctacaccgccgagcggttcatctggctgaccaagctgaacaacctgcggatcctggagcagggctccgagcggcccctgaccgacaccgagcgggccaccctgatggacgagccctaccggaagtccaagctgacctacgcccaggcccggaagctgctgggcctggaggacaccgccttcttcaagggcctgcggtacggcaaggacaacgccgaggcctccaccctgatggagatgaaggcctaccacgccatctcccgggccctggagaaggagggcctgaaggacaagaagtcccccctgaacctgtcctccgagctgcaggacgagatcggcaccgccttctccctgttcaagaccgacgaggacatcaccggccggctgaaggaccgggtgcagcccgagatcctggaggccctgctgaagcacatctccttcgacaagttcgtgcagatctccctgaaggccctgcggcggatcgtgcccctgatggagcagggcaagcggtacgacgaggcctgcgccgagatctacggcgaccactacggcaagaagaacaccgaggagaagatctacctgccccccatccccgccgacgagatccggaaccccgtggtgctgcgggccctgtcccaggcccggaaggtgatcaacggcgtggtgcggcggtacggctcccccgcccggatccacatcgagaccgcccgggaggtgggcaagtccttcaaggaccggaaggagatcgagaagcggcaggaggagaaccggaaggaccgggagaaggccgccgccaagttccgggagtacttccccaacttcgtgggcgagcccaagtccaaggacatcctgaagctgcggctgtacgagcagcagcacggcaagtgcctgtactccggcaaggagatcaacctggtgcggctgaacgagaagggctacgtggagatcgaccacgccctgcccttctcccggacctgggacgactccttcaacaacaaggtgctggtgctgggctccgagaaccagaacaagggcaaccagaccccctacgagtacttcaacggcaaggacaactcccgggagtggcaggagttcaaggcccgggtggagacctcccggttcccccggtccaagaagcagcggatcctgctgcagaagttcgacgaggacggcttcaaggagtgcaacctgaacgacacccggtacgtgaaccggttcctgtgccagttcgtggccgaccacatcctgctgaccggcaagggcaagcggcgggtgttcgcctccaacggccagatcaccaacctgctgcggggcttctggggcctgcggaaggtgcgggccgagaacgaccggcaccacgccctggacgccgtggtggtggcctgctccaccgtggccatgcagcagaagatcacccggttcgtgcggtacaaggagatgaacgccttcgacggcaagaccatcgacaaggagaccggcaaggtgctgcaccagaagacccacttcccccagccctgggagttcttcgcccaggaggtgatgatccgggtgttcggcaagcccgacggcaagcccgagttcgaggaggccgacacccccgagaagctgcggaccctgctggccgagaagctgtcctcccggcccgaggccgtgcacgagtacgtgacccccctgttcgtgtcccgggcccccaaccggaagatgtccggcgcccacaaggacaccctgcggtccgccaagcggttcgtgaagcacaacgagaagatctccgtgaagcgggtgtggctgaccgagatcaagctggccgacctggagaacatggtgaactacaagaacggccgggagatcgagctgtacgaggccctgaaggcccggctggaggcctacggcggcaacgccaagcaggccttcgaccccaaggacaaccccttctacaagaagggcggccagctggtgaaggccgtgcgggtggagaagacccaggagtccggcgtgctgctgaacaagaagaacgcctacaccatcgccgacaacggcgacatggtgcgggtggacgtgttctgcaaggtggacaagaagggcaagaaccagtacttcatcgtgcccatctacgcctggcaggtggccgagaacatcctgcccgacatcgactgcaagggctaccggatcgacgactcctacaccttctgcttctccctgcacaagtacgacctgatcgccttccagaaggacgagaagtccaaggtggagttcgcctactacatcaactgcgactcctccaacggccggttctacctggcctggcacgacaagggctccaaggagcagcagttccggatctccacccagaacctggtgctgatccagaagtaccaggtgaacgagctgggcaaggagatccggccctgccggctgaagaagcggccccccgtgcgggaggacaagcggcccgccgccaccaagaaggccggccaggccaagaagaagaagtacccctacgacgtgcccgactacgccggctacccctacgacgtgcccgactacgccggctcctacccctacgacgtgcccgactacgccgccgcccccgccgccaagaagaagaagctggactagctagcaccagcctcaagaacacccgaatggagtctctaagctacataataccaacttacactttacaaaatgttgtcccccaaaatgtagccattcgtatctgctcctaataaaaagaaagtttcttcacattctctcgagaaaaaaaaaaaatggaaaaaaaaaaaacggaaaaaaaaaaaaggtaaaaaaaaaaaatataaaaaaaaaaaacataaaaaaaaaaaacgaaaaaaaaaaaacgtaaaaaaaaaaaactcaaaaaaaaaaaagataaaaaaaaaaaacctaaaaaaaaaaaatgtaaaaaaaaaaaagggaaaaaaaaaaaacgcaaaaaaaaaaaacacaaaaaaaaaaaatgcaaaaaaaaaaaatcgaaaaaaaaaaaatctaaaaaaaaaaaacgaaaaaaaaaaaacccaaaaaaaaaaaagacaaaaaaaaaaaatagaaaaaaaaaaaagttaaaaaaaaaaaactgaaaaaaaaaaaatttaaaaaaaaaaaatctag

SEQ ID NO: 629 - DNA, 3862 bp, synthetic construct
  misc_feature 1..3862: note = Synthetic
  source 1..3862: mol_type = other DNA
gggaagctcagaataaacgctcaactttggccggatctgccaccatggccgccttcaagcccaaccccatcaactacatcctgggcctggacatcggcatcgcctccgtgggctgggccatggtggagatcgacgaggaggagaaccccatccggctgatcgacctgggcgtgcgggtgttcgagcgggccgaggtgcccaagaccggcgactccctggccatggcccggcggctggcccggtccgtgcggcggctgacccggcggcgggcccaccggctgctgcgggcccggcggctgctgaagcgggagggcgtgctgcaggccgccgacttcgacgagaacggcctgatcaagtccctgcccaacaccccctggcagctgcgggccgccgccctggaccggaagctgacccccctggagtggtccgccgtgctgctgcacctgatcaagcaccggggctacctgtcccagcggaagaacgagggcgagaccgccgacaaggagctgggcgccctgctgaagggcgtggccaacaacgcccacgccctgcagaccggcgacttccggacccccgccgagctggccctgaacaagttcgagaaggagtccggccacatccggaaccagcggggcgactactcccacaccttctcccggaaggacctgcaggccgagctgatcctgctgttcgagaagcagaaggagttcggcaacccccacgtgtccggcggcctgaaggagggcatcgagaccctgctgatgacccagcggcccgccctgtccggcgacgccgtgcagaagatgctgggccactgcaccttcgagcccgccgagcccaaggccgccaagaacacctacaccgccgagcggttcatctggctgaccaagctgaacaacctgcggatcctggagcagggctccgagcggcccctgaccgacaccgagcgggccaccctgatggacgagccctaccggaagtccaagctgacctacgcccaggcccggaagctgctgggcctggaggacaccgccttcttcaagggcctgcggtacggcaaggacaacgccgaggcctccaccctgatggagatgaaggcctaccacgccatctcccgggccctggagaaggagggcctgaaggacaagaagtcccccctgaacctgtcctccgagctgcaggacgagatcggcaccgccttctccctgttcaagaccgacgaggacatcaccggccggctgaaggaccgggtgcagcccgagatcctggaggccctgctgaagcacatctccttcgacaagttcgtgcagatctccctgaaggccctgcggcggatcgtgcccctgatggagcagggcaagcggtacgacgaggcctgcgccgagatctacggcgaccactacggcaagaagaacaccgaggagaagatctacctgccccccatccccgccgacgagatccggaaccccgtggtgctgcgggccctgtcccaggcccggaaggtgatcaacggcgtggtgcggcggtacggctcccccgcccggatccacatcgagaccgcccgggaggtgggcaagtccttcaaggaccggaaggagatcgagaagcggcaggaggagaaccggaaggaccgggagaaggccgccgccaagttccgggagtacttccccaacttcgtgggcgagcccaagtccaaggacatcctgaagctgcggctgtacgagcagcagcacggcaagtgcctgtactccggcaaggagatcaacctggtgcggctgaacgagaagggctacgtggagatcgaccacgccctgcccttctcccggacctgggacgactccttcaacaacaaggtgctggtgctgggctccgagaaccagaacaagggcaaccagaccccctacgagtacttcaacggcaaggacaactcccgggagtggcaggagttcaaggcccgggtggagacctcccggttcccccggtccaagaagcagcggatcctgctgcagaagttcgacgaggacggcttcaaggagtgcaacctgaacgacacccggtacgtgaaccggttcctgtgccagttcgtggccgaccacatcctgctgaccggcaagggcaagcggcgggtgttcgcctccaacggccagatcaccaacctgctgcggggcttctggggcctgcggaaggtgcgggccgagaacgaccggcaccacgccctggacgccgtggtggtggcctgctccaccgtggccatgcagcagaagatcacccggttcgtgcggtacaaggagatgaacgccttcgacggcaagaccatcgacaaggagaccggcaaggtgctgcaccagaagacccacttcccccagccctgggagttcttcgcccaggaggtgatgatccgggtgttcggcaagcccgacggcaagcccgagttcgaggaggccgacacccccgagaagctgcggaccctgctggccgagaagctgtcctcccggcccgaggccgtgcacgagtacgtgacccccctgttcgtgtcccgggcccccaaccggaagatgtccggcgcccacaaggacaccctgcggtccgccaagcggttcgtgaagcacaacgagaagatctccgtgaagcgggtgtggctgaccgagatcaagctggccgacctggagaacatggtgaactacaagaacggccgggagatcgagctgtacgaggccctgaaggcccggctggaggcctacggcggcaacgccaagcaggccttcgaccccaaggacaaccccttctacaagaagggcggccagctggtgaaggccgtgcgggtggagaagacccaggagtccggcgtgctgctgaacaagaagaacgcctacaccatcgccgacaacggcgacatggtgcgggtggacgtgttctgcaaggtggacaagaagggcaagaaccagtacttcatcgtgcccatctacgcctggcaggtggccgagaacatcctgcccgacatcgactgcaagggctaccggatcgacgactcctacaccttctgcttctccctgcacaagtacgacctgatcgccttccagaaggacgagaagtccaaggtggagttcgcctactacatcaactgcgactcctccaacggccggttctacctggcctggcacgacaagggctccaaggagcagcagttccggatctccacccagaacctggtgctgatccagaagtaccaggtgaacgagctgggcaaggagatccggccctgccggctgaagaagcggccccccgtgcggtccggaaagcggaccgccgacggctccggaggaggaagccccaagaagaagcggaaggtgtagctagcaccagcctcaagaacacccgaatggagtctctaagctacataataccaacttacactttacaaaatgttgtcccccaaaatgtagccattcgtatctgctcctaataaaaagaaagtttcttcacattctctcgagaaaaaaaaaaaatggaaaaaaaaaaaacggaaaaaaaaaaaaggtaaaaaaaaaaaatataaaaaaaaaaaacataaaaaaaaaaaacgaaaaaaaaaaaacgtaaaaaaaaaaactcaaaaaaaaaaagataaaaaaaaaaaacctaaaaaaaaaaaatgtaaaaaaaaaaaagggaaaaaaaaaaaacgcaaaaaaaaaaaacacaaaaaaaaaaaatgcaaaaaaaaaaaatcgaaaaaaaaaaaatctaaaaaaaaaaaacgaaaaaaaaaaaacccaaaaaaaaaaaagacaaaaaaaaaaaatagaaaaaaaaaaagttaaaaaaaaaaaactgaaaaaaaaaaaatttaaaaaaaaaaaat

SEQ ID NO: 630 - DNA, 3863 bp, synthetic construct
  misc_feature 1..3863: note = Synthetic
  source 1..3863: mol_type = other DNA
gggaagctcagaataaacgctcaactttggccggatctgccaccatggacggctccggcggcggctcccccaagaagaagcggaaggtgggcggctccggcggcggcgccgccttcaagcccaaccccatcaactacatcctgggcctggacatcggcatcgcctccgtgggctgggccatggtggagatcgacgaggaggagaaccccatccggctgatcgacctgggcgtgcgggtgttcgagcgggccgaggtgcccaagaccggcgactccctggccatggcccggcggctggcccggtccgtgcggcggctgacccggcggcgggcccaccggctgctgcgggcccggcggctgctgaagcgggagggcgtgctgcaggccgccgacttcgacgagaacggcctgatcaagtccctgcccaacaccccctggcagctgcgggccgccgccctggaccggaagctgacccccctggagtggtccgccgtgctgctgcacctgatcaagcaccggggctacctgtcccagcggaagaacgagggcgagaccgccgacaaggagctgggcgccctgctgaagggcgtggccaacaacgcccacgccctgcagaccggcgacttccggacccccgccgagctggccctgaacaagttcgagaaggagtccggccacatccggaaccagcggggcgactactcccacaccttctcccggaaggacctgcaggccgagctgatcctgctgttcgagaagcagaaggagttcggcaacccccacgtgtccggcggcctgaaggagggcatcgagaccctgctgatgacccagcggcccgccctgtccggcgacgccgtgcagaagatgctgggccactgcaccttcgagcccgccgagcccaaggccgccaagaacacctacaccgccgagcggttcatctggctgaccaagctgaacaacctgcggatcctggagcagggctccgagcggcccctgaccgacaccgagcgggccaccctgatggacgagccctaccggaagtccaagctgacctacgcccaggcccggaagctgctgggcctggaggacaccgccttcttcaagggcctgcggtacggcaaggacaacgccgaggcctccaccctgatggagatgaaggcctaccacgccatctcccgggccctggagaaggagggcctgaaggacaagaagtcccccctgaacctgtcctccgagctgcaggacgagatcggcaccgccttctccctgttcaagaccgacgaggacatcaccggccggctgaaggaccgggtgcagcccgagatcctggaggccctgctgaagcacatctccttcgacaagttcgtgcagatctccctgaaggccctgcggcggatcgtgcccctgatggagcagggcaagcggtacgacgaggcctgcgccgagatctacggcgaccactacggcaagaagaacaccgaggagaagatctacctgccccccatccccgccgacgagatccggaaccccgtggtgctgcgggccctgtcccaggcccggaaggtgatcaacggcgtggtgcggcggtacggctcccccgcccggatccacatcgagaccgcccgggaggtgggcaagtccttcaaggaccggaaggagatcgagaagcggcaggaggagaaccggaaggaccgggagaaggccgccgccaagttccgggagtacttccccaacttcgtgggcgagcccaagtccaaggacatcctgaagctgcggctgtacgagcagcagcacggcaagtgcctgtactccggcaaggagatcaacctggtgcggctgaacgagaagggctacgtggagatcgaccacgccctgcccttctcccggacctgggacgactccttcaacaacaaggtgctggtgctgggctccgagaaccagaacaagggcaaccagaccccctacgagtacttcaacggcaaggacaactcccgggagtggcaggagttcaaggcccgggtggagacctcccggttcccccggtccaagaagcagcggatcctgctgcagaagttcgacgaggacggcttcaaggagtgcaacctgaacgacacccggtacgtgaaccggttcctgtgccagttcgtggccgaccacatcctgctgaccggcaagggcaagcggcgggtgttcgcctccaacggccagatcaccaacctgctgcggggcttctggggcctgcggaaggtgcgggccgagaacgaccggcaccacgccctggacgccgtggtggtggcctgctccaccgtggccatgcagcagaagatcacccggttcgtgcggtacaaggagatgaacgccttcgacggcaagaccatcgacaaggagaccggcaaggtgctgcaccagaagacccacttcccccagccctgggagttcttcgcccaggaggtgatgatccgggtgttcggcaagcccgacggcaagcccgagttcgaggaggccgacacccccgagaagctgcggaccctgctggccgagaagctgtcctcccggcccgaggccgtgcacgagtacgtgacccccctgttcgtgtcccgggcccccaaccggaagatgtccggcgcccacaaggacaccctgcggtccgccaagcggttcgtgaagcacaacgagaagatctccgtgaagcgggtgtggctgaccgagatcaagctggccgacctggagaacatggtgaactacaagaacggccgggagatcgagctgtacgaggccctgaaggcccggctggaggcctacggcggcaacgccaagcaggccttcgaccccaaggacaaccccttctacaagaagggcggccagctggtgaaggccgtgcgggtggagaagacccaggagtccggcgtgctgctgaacaagaagaacgcctacaccatcgccgacaacggcgacatggtgcgggtggacgtgttctgcaaggtggacaagaagggcaagaaccagtacttcatcgtgcccatctacgcctggcaggtggccgagaacatcctgcccgacatcgactgcaagggctaccggatcgacgactcctacaccttctgcttctccctgcacaagtacgacctgatcgccttccagaaggacgagaagtccaaggtggagttcgcctactacatcaactgcgactcctccaacggccggttctacctggcctggcacgacaagggctccaaggagcagcagttccggatctccacccagaacctggtgctgatccagaagtaccaggtgaacgagctgggcaaggagatccggccctgccggctgaagaagcggccccccgtgcggtagctagcaccagcctcaagaacacccgaatggagtctctaagctacataataccaacttacactttacaaaatgttgtcccccaaaatgtagccattcgtatctgctcctaataaaaagaaagtttcttcacattctctcgagaaaaaaaaaaaatggaaaaaaaaaaaacggaaaaaaaaaaaaggtaaaaaaaaaaaatataaaaaaaaaaaacataaaaaaaaaaaacgaaaaaaaaaaaacgtaaaaaaaaaaaactcaaaaaaaaaaagataaaaaaaaaaaacctaaaaaaaaaaaatgtaaaaaaaaaaaagggaaaaaaaaaaaacgcaaaaaaaaaaaacacaaaaaaaaaaaatgcaaaaaaaaaaaatcgaaaaaaaaaaaatctaaaaaaaaaaaacgaaaaaaaaaaaacccaaaaaaaaaaaagacaaaaaaaaaaaatagaaaaaaaaaaagttaaaaaaaaaaaactgaaaaaaaaaaaatttaaaaaaaaaaaat

SEQ ID NO: 631 - RNA, 3926 nt, synthetic construct
  misc_feature 1..3926: note = Synthetic
  source 1..3926: mol_type = other RNA
gggaagctcagaataaacgctcaactttggccggatctgccaccatggacggctccggcggcggctcccccaagaagaagcggaaggtgggcggctccggcggcggcgccgccttcaagcccaaccccatcaactacatcctgggcctggacatcggcatcgcctccgtgggctgggccatggtggagatcgacgaggaggagaaccccatccggctgatcgacctgggcgtgcgggtgttcgagcgggccgaggtgcccaagaccggcgactccctggccatggcccggcggctggcccggtccgtgcggcggctgacccggcggcgggcccaccggctgctgcgggcccggcggctgctgaagcgggagggcgtgctgcaggccgccgacttcgacgagaacggcctgatcaagtccctgcccaacaccccctggcagctgcgggccgccgccctggaccggaagctgacccccctggagtggtccgccgtgctgctgcacctgatcaagcaccggggctacctgtcccagcggaagaacgagggcgagaccgccgacaaggagctgggcgccctgctgaagggcgtggccaacaacgcccacgccctgcagaccggcgacttccggacccccgccgagctggccctgaacaagttcgagaaggagtccggccacatccggaaccagcggggcgactactcccacaccttctcccggaaggacctgcaggccgagctgatcctgctgttcgagaagcagaaggagttcggcaacccccacgtgtccggcggcctgaaggagggcatcgagaccctgctgatgacccagcggcccgccctgtccggcgacgccgtgcagaagatgctgggccactgcaccttcgagcccgccgagcccaaggccgccaagaacacctacaccgccgagcggttcatctggctgaccaagctgaacaacctgcggatcctggagcagggctccgagcggcccctgaccgacaccgagcgggccaccctgatggacgagccctaccggaagtccaagctgacctacgcccaggcccggaagctgctgggcctggaggacaccgccttcttcaagggcctgcggtacggcaaggacaacgccgaggcctccaccctgatggagatgaaggcctaccacgccatctcccgggccctggagaaggagggcctgaaggacaagaagtcccccctgaacctgtcctccgagctgcaggacgagatcggcaccgccttctccctgttcaagaccgacgaggacatcaccggccggctgaaggaccgggtgcagcccgagatcctggaggccctgctgaagcacatctccttcgacaagttcgtgcagatctccctgaaggccctgcggcggatcgtgcccctgatggagcagggcaagcggtacgacgaggcctgcgccgagatctacggcgaccactacggcaagaagaacaccgaggagaagatctacctgccccccatccccgccgacgagatccggaaccccgtggtgctgcgggccctgtcccaggcccggaaggtgatcaacggcgtggtgcggcggtacggctcccccgcccggatccacatcgagaccgcccgggaggtgggcaagtccttcaaggaccggaaggagatcgagaagcggcaggaggagaaccggaaggaccgggagaaggccgccgccaagttccgggagtacttccccaacttcgtgggcgagcccaagtccaaggacatcctgaagctgcggctgtacgagcagcagcacggcaagtgcctgtactccggcaaggagatcaacctggtgcggctgaacgagaagggctacgtggagatcgaccacgccctgcccttctcccggacctgggacgactccttcaacaacaaggtgctggtgctgggctccgagaaccagaacaagggcaaccagaccccctacgagtacttcaacggcaaggacaactcccgggagtggcaggagttcaaggcccgggtggagacctcccggttcccccggtccaagaagcagcggatcctgctgcagaagttcgacgaggacggcttcaaggagtgcaacctgaacgacacccggtacgtgaaccggttcctgtgccagttcgtggccgaccacatcctgctgaccggcaagggcaagcggcgggtgttcgcctccaacggccagatcaccaacctgctgcggggcttctggggcctgcggaaggtgcgggccgagaacgaccggcaccacgccctggacgccgtggtggtggcctgctccaccgtggccatgcagcagaagatcacccggttcgtgcggtacaaggagatgaacgccttcgacggcaagaccatcgacaaggagaccggcaaggtgctgcaccagaagacccacttcccccagccctgggagttcttcgcccaggaggtgatgatccgggtgttcggcaagcccgacggcaagcccgagttcgaggaggccgacacccccgagaagctgcggaccctgctggccgagaagctgtcctcccggcccgaggccgtgcacgagtacgtgacccccctgttcgtgtcccgggcccccaaccggaagatgtccggcgcccacaaggacaccctgcggtccgccaagcggttcgtgaagcacaacgagaagatctccgtgaagcgggtgtggctgaccgagatcaagctggccgacctggagaacatggtgaactacaagaacggccgggagatcgagctgtacgaggccctgaaggcccggctggaggcctacggcggcaacgccaagcaggccttcgaccccaaggacaaccccttctacaagaagggcggccagctggtgaaggccgtgcgggtggagaagacccaggagtccggcgtgctgctgaacaagaagaacgcctacaccatcgccgacaacggcgacatggtgcgggtggacgtgttctgcaaggtggacaagaagggcaagaaccagtacttcatcgtgcccatctacgcctggcaggtggccgagaacatcctgcccgacatcgactgcaagggctaccggatcgacgactcctacaccttctgcttctccctgcacaagtacgacctgatcgccttccagaaggacgagaagtccaaggtggagttcgcctactacatcaactgcgactcctccaacggccggttctacctggcctggcacgacaagggctccaaggagcagcagttccggatctccacccagaacctggtgctgatccagaagtaccaggtgaacgagctgggcaaggagatccggccctgccggctgaagaagcggccccccgtgcggtccgagtccgccacccccgagtccgtgtccggctggcggctgttcaagaagatctcctagctagcaccagcctcaagaacacccgaatggagtctctaagctacataataccaacttacactttacaaaatgttgtcccccaaaatgtagccattcgtatctgctcctaataaaaagaaagtttcttcacattctctcgagaaaaaaaaaaaatggaaaaaaaaaaaacggaaaaaaaaaaaaggtaaaaaaaaaaaatataaaaaaaaaaaacataaaaaaaaaaaacgaaaaaaaaaaaacgtaaaaaaaaaaaactcaaaaaaaaaaaagataaaaaaaaaaaacctaaaaaaaaaaaatgtaaaaaaaaaaaagggaaaaaaaaaaaacgcaaaaaaaaaaaacacaaaaaaaaaaaatgcaaaaaaaaaaaatcgaaaaaaaaaaaatctaaaaaaaaaaaacgaaaaaaaaaaaacccaaaaaaaaaaaagacaaaaaaaaaaaatagaaaaaaaaaaaagttaaaaaaaaaaaactgaaaaaaaaaaaatttaaaaaaaaaaaatctag

SEQ ID NO: 632 - RNA, 3933 nt, synthetic construct
  misc_feature 1..3933: note = Synthetic
  source 1..3933: mol_type = other RNA
gggaagctcagaataaacgctcaactttggccggatctgccaccatggacggctccggcggcggctcccccaagaagaagcggaaggtgggcggctccggcggcggcgccgccttcaagcccaaccccatcaactacatcctgggcctggacatcggcatcgcctccgtgggctgggccatggtggagatcgacgaggaggagaaccccatccggctgatcgacctgggcgtgcgggtgttcgagcgggccgaggtgcccaagaccggcgactccctggccatggcccggcggctggcccggtccgtgcggcggctgacccggcggcgggcccaccggctgctgcgggcccggcggctgctgaagcgggagggcgtgctgcaggccgccgacttcgacgagaacggcctgatcaagtccctgcccaacaccccctggcagctgcgggccgccgccctggaccggaagctgacccccctggagtggtccgccgtgctgctgcacctgatcaagcaccggggctacctgtcccagcggaagaacgagggcgagaccgccgacaaggagctgggcgccctgctgaagggcgtggccaacaacgcccacgccctgcagaccggcgacttccggacccccgccgagctggccctgaacaagttcgagaaggagtccggccacatccggaaccagcggggcgactactcccacaccttctcccggaaggacctgcaggccgagctgatcctgctgttcgagaagcagaaggagttcggcaacccccacgtgtccggcggcctgaaggagggcatcgagaccctgctgatgacccagcggcccgccctgtccggcgacgccgtgcagaagatgctgggccactgcaccttcgagcccgccgagcccaaggccgccaagaacacctacaccgccgagcggttcatctggctgaccaagctgaacaacctgcggatcctggagcagggctccgagcggcccctgaccgacaccgagcgggccaccctgatggacgagccctaccggaagtccaagctgacctacgcccaggcccggaagctgctgggcctggaggacaccgccttcttcaagggcctgcggtacggcaaggacaacgccgaggcctccaccctgatggagatgaaggcctaccacgccatctcccgggccctggagaaggagggcctgaaggacaagaagtcccccctgaacctgtcctccgagctgcaggacgagatcggcaccgccttctccctgttcaagaccgacgaggacatcaccggccggctgaaggaccgggtgcagcccgagatcctggaggccctgctgaagcacatctccttcgacaagttcgtgcagatctccctgaaggccctgcggcggatcgtgcccctgatggagcagggcaagcggtacgacgaggcctgcgccgagatctacggcgaccactacggcaagaagaacaccgaggagaagatctacctgccccccatccccgccgacgagatccggaaccccgtggtgctgcgggccctgtcccaggcccggaaggtgatcaacggcgtggtgcggcggtacggctcccccgcccggatccacatcgagaccgcccgggaggtgggcaagtccttcaaggaccggaaggagatcgagaagcggcaggaggagaaccggaaggaccgggagaaggccgccgccaagttccgggagtacttccccaacttcgtgggcgagcccaagtccaaggacatcctgaagctgcggctgtacgagcagcagcacggcaagtgcctgtactccggcaaggagatcaacctggtgcggctgaacgagaagggctacgtggagatcgaccacgccctgcccttctcccggacctgggacgactccttcaacaacaaggtgctggtgctgggctccgagaaccagaacaagggcaaccagaccccctacgagtacttcaacggcaaggacaactcccgggagtggcaggagttcaaggcccgggtggagacctcccggttcccccggtccaagaagcagcggatcctgctgcagaagttcgacgaggacggcttcaaggagtgcaacctgaacgacacccggtacgtgaaccggttcctgtgccagttcgtggccgaccacatcctgctgaccggcaagggcaagcggcgggtgttcgcctccaacggccagatcaccaacctgctgcggggcttctggggcctgcggaaggtgcgggccgagaacgaccggcaccacgccctggacgccgtggtggtggcctgctccaccgtggccatgcagcagaagatcacccggttcgtgcggtacaaggagatgaacgccttcgacggcaagaccatcgacaaggagaccggcaaggtgctgcaccagaagacccacttcccccagccctgggagttcttcgcccaggaggtgatgatccgggtgttcggcaagcccgacggcaagcccgagttcgaggaggccgacacccccgagaagctgcggaccctgctggccgagaagctgtcctcccggcccgaggccgtgcacgagtacgtgacccccctgttcgtgtcccgggcccccaaccggaagatgtccggcgcccacaaggacaccctgcggtccgccaagcggttcgtgaagcacaacgagaagatctccgtgaagcgggtgtggctgaccgagatcaagctggccgacctggagaacatggtgaactacaagaacggccgggagatcgagctgtacgaggccctgaaggcccggctggaggcctacggcggcaacgccaagcaggccttcgaccccaaggacaaccccttctacaagaagggcggccagctggtgaaggccgtgcgggtggagaagacccaggagtccggcgtgctgctgaacaagaagaacgcctacaccatcgccgacaacggcgacatggtgcgggtggacgtgttctgcaaggtggacaagaagggcaagaaccagtacttcatcgtgcccatctacgcctggcaggtggccgagaacatcctgcccgacatcgactgcaagggctaccggatcgacgactcctacaccttctgcttctccctgcacaagtacgacctgatcgccttccagaaggacgagaagtccaaggtggagttcgcctactacatcaactgcgactcctccaacggccggttctacctggcctggcacgacaagggctccaaggagcagcagttccggatctccacccagaacctggtgctgatccagaagtaccaggtgaacgagctgggcaaggagatccggccctgccggctgaagaagcggccccccgtgcggtccggaaagcggaccgccgacggctccggaggaggaagccccgccgccaagaagaagaagctggactagctagcaccagcctcaagaacacccgaatggagtctctaagctacataataccaacttacactttacaaaatgttgtcccccaaaatgtagccattcgtatctgctcctaataaaaagaaagtttcttcacattctctcgagaaaaaaaaaaaatggaaaaaaaaaaaacggaaaaaaaaaaaaggtaaaaaaaaaaaatataaaaaaaaaaaacataaaaaaaaaaaacgaaaaaaaaaaaacgtaaaaaaaaaaaactcaaaaaaaaaaagataaaaaaaaaaaacctaaaaaaaaaaaatgtaaaaaaaaaaaagggaaaaaaaaaaaacgcaaaaaaaaaaaacacaaaaaaaaaaaatgcaaaaaaaaaaaatcgaaaaaaaaaaaatctaaaaaaaaaaaacgaaaaaaaaaaaacccaaaaaaaaaaaagacaaaaaaaaaaaatagaaaaaaaaaaagttaaaaaaaaaaaactgaaaaaaaaaaaatttaaaaaaaaaaaatctag

SEQ ID NO: 633 - RNA, 3921 nt, synthetic construct
  misc_feature 1..3921: note = Synthetic
  source 1..3921: mol_type = other RNA
gggaagctcagaataaacgctcaactttggccggatctgccaccatggacggctccggcggcggctcccccaagaagaagcggaaggtggaggacaagcggcccgccgccaccaagaaggccggccaggccaagaagaagaagggcggctccggcggcggcgccgccttcaagcccaaccccatcaactacatcctgggcctggacatcggcatcgcctccgtgggctgggccatggtggagatcgacgaggaggagaaccccatccggctgatcgacctgggcgtgcgggtgttcgagcgggccgaggtgcccaagaccggcgactccctggccatggcccggcggctggcccggtccgtgcggcggctgacccggcggcgggcccaccggctgctgcgggcccggcggctgctgaagcgggagggcgtgctgcaggccgccgacttcgacgagaacggcctgatcaagtccctgcccaacaccccctggcagctgcgggccgccgccctggaccggaagctgacccccctggagtggtccgccgtgctgctgcacctgatcaagcaccggggctacctgtcccagcggaagaacgagggcgagaccgccgacaaggagctgggcgccctgctgaagggcgtggccaacaacgcccacgccctgcagaccggcgacttccggacccccgccgagctggccctgaacaagttcgagaaggagtccggccacatccggaaccagcggggcgactactcccacaccttctcccggaaggacctgcaggccgagctgatcctgctgttcgagaagcagaaggagttcggcaacccccacgtgtccggcggcctgaaggagggcatcgagaccctgctgatgacccagcggcccgccctgtccggcgacgccgtgcagaagatgctgggccactgcaccttcgagcccgccgagcccaaggccgccaagaacacctacaccgccgagcggttcatctggctgaccaagctgaacaacctgcggatcctggagcagggctccgagcggcccctgaccgacaccgagcgggccaccctgatggacgagccctaccggaagtccaagctgacctacgcccaggcccggaagctgctgggcctggaggacaccgccttcttcaagggcctgcggtacggcaaggacaacgccgaggcctccaccctgatggagatgaaggcctaccacgccatctcccgggccctggagaaggagggcctgaaggacaagaagtcccccctgaacctgtcctccgagctgcaggacgagatcggcaccgccttctccctgttcaagaccgacgaggacatcaccggccggctgaaggaccgggtgcagcccgagatcctggaggccctgctgaagcacatctccttcgacaagttcgtgcagatctccctgaaggccctgcggcggatcgtgcccctgatggagcagggcaagcggtacgacgaggcctgcgccgagatctacggcgaccactacggcaagaagaacaccgaggagaagatctacctgccccccatccccgccgacgagatccggaaccccgtggtgctgcgggccctgtcccaggcccggaaggtgatcaacggcgtggtgcggcggtacggctcccccgcccggatccacatcgagaccgcccgggaggtgggcaagtccttcaaggaccggaaggagatcgagaagcggcaggaggagaaccggaaggaccgggagaaggccgccgccaagttccgggagtacttccccaacttcgtgggcgagcccaagtccaaggacatcctgaagctgcggctgtacgagcagcagcacggcaagtgcctgtactccggcaaggagatcaacctggtgcggctgaacgagaagggctacgtggagatcgaccacgccctgcccttctcccggacctgggacgactccttcaacaacaaggtgctggtgctgggctccgagaaccagaacaagggcaaccagaccccctacgagtacttcaacggcaaggacaactcccgggagtggcaggagttcaaggcccgggtggagacctcccggttcccccggtccaagaagcagcggatcctgctgcagaagttcgacgaggacggcttcaaggagtgcaacctgaacgacacccggtacgtgaaccggttcctgtgccagttcgtggccgaccacatcctgctgaccggcaagggcaagcggcgggtgttcgcctccaacggccagatcaccaacctgctgcggggcttctggggcctgcggaaggtgcgggccgagaacgaccggcaccacgccctggacgccgtggtggtggcctgctccaccgtggccatgcagcagaagatcacccggttcgtgcggtacaaggagatgaacgccttcgacggcaagaccatcgacaaggagaccggcaaggtgctgcaccagaagacccacttcccccagccctgggagttcttcgcccaggaggtgatgatccgggtgttcggcaagcccgacggcaagcccgagttcgaggaggccgacacccccgagaagctgcggaccctgctggccgagaagctgtcctcccggcccgaggccgtgcacgagtacgtgacccccctgttcgtgtcccgggcccccaaccggaagatgtccggcgcccacaaggacaccctgcggtccgccaagcggttcgtgaagcacaacgagaagatctccgtgaagcgggtgtggctgaccgagatcaagctggccgacctggagaacatggtgaactacaagaacggccgggagatcgagctgtacgaggccctgaaggcccggctggaggcctacggcggcaacgccaagcaggccttcgaccccaaggacaaccccttctacaagaagggcggccagctggtgaaggccgtgcgggtggagaagacccaggagtccggcgtgctgctgaacaagaagaacgcctacaccatcgccgacaacggcgacatggtgcgggtggacgtgttctgcaaggtggacaagaagggcaagaaccagtacttcatcgtgcccatctacgcctggcaggtggccgagaacatcctgcccgacatcgactgcaagggctaccggatcgacgactcctacaccttctgcttctccctgcacaagtacgacctgatcgccttccagaaggacgagaagtccaaggtggagttcgcctactacatcaactgcgactcctccaacggccggttctacctggcctggcacgacaagggctccaaggagcagcagttccggatctccacccagaacctggtgctgatccagaagtaccaggtgaacgagctgggcaaggagatccggccctgccggctgaagaagcggccccccgtgcggtagctagcaccagcctcaagaacacccgaatggagtctctaagctacataataccaacttacactttacaaaatgttgtcccccaaaatgtagccattcgtatctgctcctaataaaaagaaagtttcttcacattctctcgagaaaaaaaaaaaatggaaaaaaaaaaaacggaaaaaaaaaaaaggtaaaaaaaaaaaatataaaaaaaaaaaacataaaaaaaaaaaacgaaaaaaaaaaaacgtaaaaaaaaaaaactcaaaaaaaaaaagataaaaaaaaaaaacctaaaaaaaaaaaatgtaaaaaaaaaaaagggaaaaaaaaaaaacgcaaaaaaaaaaaacacaaaaaaaaaaaatgcaaaaaaaaaaaatcgaaaaaaaaaaaatctaaaaaaaaaaaacgaaaaaaaaaaaacccaaaaaaaaaaaagacaaaaaaaaaaaatagaaaaaaaaaaagttaaaaaaaaaaaactgaaaaaaaaaaaatttaaaaaaaaaaaatctag

SEQ ID NO: 634 - RNA, 3980 nt, synthetic construct
  misc_feature 1..3980: note = Synthetic
  source 1..3980: mol_type = other RNA
gggaagctcagaataaacgctcaactttggccggatctgccaccatggacggctccggcggcggctcccccaagaagaagcggaaggtggaggacaagcggcccgccgccaccaagaaggccggccaggccaagaagaagaagggcggctccggcggcggcgccgccttcaagcccaaccccatcaactacatcctgggcctggacatcggcatcgcctccgtgggctgggccatggtggagatcgacgaggaggagaaccccatccggctgatcgacctgggcgtgcgggtgttcgagcgggccgaggtgcccaagaccggcgactccctggccatggcccggcggctggcccggtccgtgcggcggctgacccggcggcgggcccaccggctgctgcgggcccggcggctgctgaagcgggagggcgtgctgcaggccgccgacttcgacgagaacggcctgatcaagtccctgcccaacaccccctggcagctgcgggccgccgccctggaccggaagctgacccccctggagtggtccgccgtgctgctgcacctgatcaagcaccggggctacctgtcccagcggaagaacgagggcgagaccgccgacaaggagctgggcgccctgctgaagggcgtggccaacaacgcccacgccctgcagaccggcgacttccggacccccgccgagctggccctgaacaagttcgagaaggagtccggccacatccggaaccagcggggcgactactcccacaccttctcccggaaggacctgcaggccgagctgatcctgctgttcgagaagcagaaggagttcggcaacccccacgtgtccggcggcctgaaggagggcatcgagaccctgctgatgacccagcggcccgccctgtccggcgacgccgtgcagaagatgctgggccactgcaccttcgagcccgccgagcccaaggccgccaagaacacctacaccgccgagcggttcatctggctgaccaagctgaacaacctgcggatcctggagcagggctccgagcggcccctgaccgacaccgagcgggccaccctgatggacgagccctaccggaagtccaagctgacctacgcccaggcccggaagctgctgggcctggaggacaccgccttcttcaagggcctgcggtacggcaaggacaacgccgaggcctccaccctgatggagatgaaggcctaccacgccatctcccgggccctggagaaggagggcctgaaggacaagaagtcccccctgaacctgtcctccgagctgcaggacgagatcggcaccgccttctccctgttcaagaccgacgaggacatcaccggccggctgaaggaccgggtgcagcccgagatcctggaggccctgctgaagcacatctccttcgacaagttcgtgcagatctccctgaaggccctgcggcggatcgtgcccctgatggagcagggcaagcggtacgacgaggcctgcgccgagatctacggcgaccactacggcaagaagaacaccgaggagaagatctacctgccccccatccccgccgacgagatccggaaccccgtggtgctgcgggccctgtcccaggcccggaaggtgatcaacggcgtggtgcggcggtacggctcccccgcccggatccacatcgagaccgcccgggaggtgggcaagtccttcaaggaccggaaggagatcgagaagcggcaggaggagaaccggaaggaccgggagaaggccgccgccaagttccgggagtacttccccaacttcgtgggcgagcccaagtccaaggacatcctgaagctgcggctgtacgagcagcagcacggcaagtgcctgtactccggcaaggagatcaacctggtgcggctgaacgagaagggctacgtggagatcgaccacgccctgcccttctcccggacctgggacgactccttcaacaacaaggtgctggtgctgggctccgagaaccagaacaagggcaaccagaccccctacgagtacttcaacggcaaggacaactcccgggagtggcaggagttcaaggcccgggtggagacctcccggttcccccggtccaagaagcagcggatcctgctgcagaagttcgacgaggacggcttcaaggagtgcaacctgaacgacacccggtacgtgaaccggttcctgtgccagttcgtggccgaccacatcctgctgaccggcaagggcaagcggcgggtgttcgcctccaacggccagatcaccaacctgctgcggggcttctggggcctgcggaaggtgcgggccgagaacgaccggcaccacgccctggacgccgtggtggtggcctgctccaccgtggccatgcagcagaagatcacccggttcgtgcggtacaaggagatgaacgccttcgacggcaagaccatcgacaaggagaccggcaaggtgctgcaccagaagacccacttcccccagccctgggagttcttcgcccaggaggtgatgatccgggtgttcggcaagcccgacggcaagcccgagttcgaggaggccgacacccccgagaagctgcggaccctgctggccgagaagctgtcctcccggcccgaggccgtgcacgagtacgtgacccccctgttcgtgtcccgggcccccaaccggaagatgtccggcgcccacaaggacaccctgcggtccgccaagcggttcgtgaagcacaacgagaagatctccgtgaagcgggtgtggctgaccgagatcaagctggccgacctggagaacatggtgaactacaagaacggccgggagatcgagctgtacgaggccctgaaggcccggctggaggcctacggcggcaacgccaagcaggccttcgaccccaaggacaaccccttctacaagaagggcggccagctggtgaaggccgtgcgggtggagaagacccaggagtccggcgtgctgctgaacaagaagaacgcctacaccatcgccgacaacggcgacatggtgcgggtggacgtgttctgcaaggtggacaagaagggcaagaaccagtacttcatcgtgcccatctacgcctggcaggtggccgagaacatcctgcccgacatcgactgcaagggctaccggatcgacgactcctacaccttctgcttctccctgcacaagtacgacctgatcgccttccagaaggacgagaagtccaaggtggagttcgcctactacatcaactgcgactcctccaacggccggttctacctggcctggcacgacaagggctccaaggagcagcagttccggatctccacccagaacctggtgctgatccagaagtaccaggtgaacgagctgggcaaggagatccggccctgccggctgaagaagcggccccccgtgcggtccgagtccgccacccccgagtccgtgtccggctggcggctgttcaagaagatctcctagctagcaccagcctcaagaacacccgaatggagtctctaagctacataataccaacttacactttacaaaatgttgtcccccaaaatgtagccattcgtatctgctcctaataaaaagaaagtttcttcacattctctcgagaaaaaaaaaaaatggaaaaaaaaaaaacggaaaaaaaaaaaaggtaaaaaaaaaaaatataaaaaaaaaaaacataaaaaaaaaaaacgaaaaaaaaaaaacgtaaaaaaaaaaaactcaaaaaaaaaaaagataaaaaaaaaaaacctaaaaaaaaaaaatgtaaaaaaaaaaaagggaaaaaaaaaaaacgcaaaaaaaaaaaacacaaaaaaaaaaaatgcaaaaaaaaaaaatcgaaaaaaaaaaaatctaaaaaaaaaaaacgaaaaaaaaaaaacccaaaaaaaaaaaagacaaaaaaaaaaaatagaaaaaaaaaaaagttaaaaaaaaaaaactgaaaaaaaaaaaatttaaaaaaaaaaaatctag

SEQ ID NO: 635 - RNA, 3867 nt, synthetic construct
  misc_feature 1..3867: note = Synthetic
  source 1..3867: mol_type = other RNA
gggaagctcagaataaacgctcaactttggccggatctgccaccatggacggctccggcggcggctcccccaagaagaagcggaaggtgggcggctccggcggcggcgccgccttcaagcccaaccccatcaactacatcctgggcctggacatcggcatcgcctccgtgggctgggccatggtggagatcgacgaggaggagaaccccatccggctgatcgacctgggcgtgcgggtgttcgagcgggccgaggtgcccaagaccggcgactccctggccatggcccggcggctggcccggtccgtgcggcggctgacccggcggcgggcccaccggctgctgcgggcccggcggctgctgaagcgggagggcgtgctgcaggccgccgacttcgacgagaacggcctgatcaagtccctgcccaacaccccctggcagctgcgggccgccgccctggaccggaagctgacccccctggagtggtccgccgtgctgctgcacctgatcaagcaccggggctacctgtcccagcggaagaacgagggcgagaccgccgacaaggagctgggcgccctgctgaagggcgtggccaacaacgcccacgccctgcagaccggcgacttccggacccccgccgagctggccctgaacaagttcgagaaggagtccggccacatccggaaccagcggggcgactactcccacaccttctcccggaaggacctgcaggccgagctgatcctgctgttcgagaagcagaaggagttcggcaacccccacgtgtccggcggcctgaaggagggcatcgagaccctgctgatgacccagcggcccgccctgtccggcgacgccgtgcagaagatgctgggccactgcaccttcgagcccgccgagcccaaggccgccaagaacacctacaccgccgagcggttcatctggctgaccaagctgaacaacctgcggatcctggagcagggctccgagcggcccctgaccgacaccgagcgggccaccctgatggacgagccctaccggaagtccaagctgacctacgcccaggcccggaagctgctgggcctggaggacaccgccttcttcaagggcctgcggtacggcaaggacaacgccgaggcctccaccctgatggagatgaaggcctaccacgccatctcccgggccctggagaaggagggcctgaaggacaagaagtcccccctgaacctgtcctccgagctgcaggacgagatcggcaccgccttctccctgttcaagaccgacgaggacatcaccggccggctgaaggaccgggtgcagcccgagatcctggaggccctgctgaagcacatctccttcgacaagttcgtgcagatctccctgaaggccctgcggcggatcgtgcccctgatggagcagggcaagcggtacgacgaggcctgcgccgagatctacggcgaccactacggcaagaagaacaccgaggagaagatctacctgccccccatccccgccgacgagatccggaaccccgtggtgctgcgggccctgtcccaggcccggaaggtgatcaacggcgtggtgcggcggtacggctcccccgcccggatccacatcgagaccgcccgggaggtgggcaagtccttcaaggaccggaaggagatcgagaagcggcaggaggagaaccggaaggaccgggagaaggccgccgccaagttccgggagtacttccccaacttcgtgggcgagcccaagtccaaggacatcctgaagctgcggctgtacgagcagcagcacggcaagtgcctgtactccggcaaggagatcaacctggtgcggctgaacgagaagggctacgtggagatcgaccacgccctgcccttctcccggacctgggacgactccttcaacaacaaggtgctggtgctgggctccgagaaccagaacaagggcaaccagaccccctacgagtacttcaacggcaaggacaactcccgggagtggcaggagttcaaggcccgggtggagacctcccggttcccccggtccaagaagcagcggatcctgctgcagaagttcgacgaggacggcttcaaggagtgcaacctgaacgacacccggtacgtgaaccggttcctgtgccagttcgtggccgaccacatcctgctgaccggcaagggcaagcggcgggtgttcgcctccaacggccagatcaccaacctgctgcggggcttctggggcctgcggaaggtgcgggccgagaacgaccggcaccacgccctggacgccgtggtggtggcctgctccaccgtggccatgcagcagaagatcacccggttcgtgcggtacaaggagatgaacgccttcgacggcaagaccatcgacaaggagaccggcaaggtgctgcaccagaagacccacttcccccagccctgggagttcttcgcccaggaggtgatgatccgggtgttcggcaagcccgacggcaagcccgagttcgaggaggccgacacccccgagaagctgcggaccctgctggccgagaagctgtcctcccggcccgaggccgtgcacgagtacgtgacccccctgttcgtgtcccgggcccccaaccggaagatgtccggcgcccacaaggacaccctgcggtccgccaagcggttcgtgaagcacaacgagaagatctccgtgaagcgggtgtggctgaccgagatcaagctggccgacctggagaacatggtgaactacaagaacggccgggagatcgagctgtacgaggccctgaaggcccggctggaggcctacggcggcaacgccaagcaggccttcgaccccaaggacaaccccttctacaagaagggcggccagctggtgaaggccgtgcgggtggagaagacccaggagtccggcgtgctgctgaacaagaagaacgcctacaccatcgccgacaacggcgacatggtgcgggtggacgtgttctgcaaggtggacaagaagggcaagaaccagtacttcatcgtgcccatctacgcctggcaggtggccgagaacatcctgcccgacatcgactgcaagggctaccggatcgacgactcctacaccttctgcttctccctgcacaagtacgacctgatcgccttccagaaggacgagaagtccaaggtggagttcgcctactacatcaactgcgactcctccaacggccggttctacctggcctggcacgacaagggctccaaggagcagcagttccggatctccacccagaacctggtgctgatccagaagtaccaggtgaacgagctgggcaaggagatccggccctgccggctgaagaagcggccccccgtgcggtagctagcaccagcctcaagaacacccgaatggagtctctaagctacataataccaacttacactttacaaaatgttgtcccccaaaatgtagccattcgtatctgctcctaataaaaagaaagtttcttcacattctctcgagaaaaaaaaaaaatggaaaaaaaaaaaacggaaaaaaaaaaaaggtaaaaaaaaaaaatataaaaaaaaaaaacataaaaaaaaaaaacgaaaaaaaaaaaacgtaaaaaaaaaaaactcaaaaaaaaaaagataaaaaaaaaaaacctaaaaaaaaaaaatgtaaaaaaaaaaaagggaaaaaaaaaaaacgcaaaaaaaaaaaacacaaaaaaaaaaaatgcaaaaaaaaaaaatcgaaaaaaaaaaaatctaaaaaaaaaaaacgaaaaaaaaaaaacccaaaaaaaaaaaagacaaaaaaaaaaaatagaaaaaaaaaaagttaaaaaaaaaaaactgaaaaaaaaaaaatttaaaaaaaaaaaatctag

SEQ ID NO: 636 - DNA, 4622 bp, synthetic construct
  misc_feature 1..4622: note = Synthetic
  source 1..4622: mol_type = other DNA
gggaagctcagaataaacgctcaactttggccggatctgccaccatggacggctccggcggcggctcccccaagaagaagcggaaggtggaggacaagcggcccgccgccaccaagaaggccggccaggccaagaagaagaagggcggctccggcggcggcgaggcctcccccgcctccggcccccggcacctgatggacccccacatcttcacctccaacttcaacaacggcatcggccggcacaagacctacctgtgctacgaggtggagcggctggacaacggcacctccgtgaagatggaccagcaccggggcttcctgcacaaccaggccaagaacctgctgtgcggcttctacggccggcacgccgagctgcggttcctggacctggtgccctccctgcagctggaccccgcccagatctaccgggtgacctggttcatctcctggtccccctgcttctcctggggctgcgccggcgaggtgcgggccttcctgcaggagaacacccacgtgcggctgcggatcttcgccgcccggatctacgactacgaccccctgtacaaggaggccctgcagatgctgcgggacgccggcgcccaggtgtccatcatgacctacgacgagttcaagcactgctgggacaccttcgtggaccaccagggctgccccttccagccctgggacggcctggacgagcactcccaggccctgtccggccggctgcgggccatcctgcagaaccagggcaactccggctccgagacccccggcacctccgagtccgccacccccgagtccgcagcgttcaaaccaaatcccatcaactacatcctgggcctggccatcggcatcgcctccgtgggctgggccatggtggagatcgacgaggaggagaaccccatccggctgatcgacctgggcgtgcgggtgttcgagcgggccgaggtgcccaagaccggcgactccctggccatggcccggcggctggcccggtccgtgcggcggctgacccggcggcgggcccaccggctgctgcgggcccggcggctgctgaagcgggagggcgtgctgcaggccgccgacttcgacgagaacggcctgatcaagtccctgcccaacaccccctggcagctgcgggccgccgccctggaccggaagctgacccccctggagtggtccgccgtgctgctgcacctgatcaagcaccggggctacctgtcccagcggaagaacgagggcgagaccgccgacaaggagctgggcgccctgctgaagggcgtggccaacaacgcccacgccctgcagaccggcgacttccggacccccgccgagctggccctgaacaagttcgagaaggagtccggccacatccggaaccagcggggcgactactcccacaccttctcccggaaggacctgcaggccgagctgatcctgctgttcgagaagcagaaggagttcggcaacccccacgtgtccggcggcctgaaggagggcatcgagaccctgctgatgacccagcggcccgccctgtccggcgacgccgtgcagaagatgctgggccactgcaccttcgagcccgccgagcccaaggccgccaagaacacctacaccgccgagcggttcatctggctgaccaagctgaacaacctgcggatcctggagcagggctccgagcggcccctgaccgacaccgagcgggccaccctgatggacgagccctaccggaagtccaagctgacctacgcccaggcccggaagctgctgggcctggaggacaccgccttcttcaagggcctgcggtacggcaaggacaacgccgaggcctccaccctgatggagatgaaggcctaccacgccatctcccgggccctggagaaggagggcctgaaggacaagaagtcccccctgaacctgtcctccgagctgcaggacgagatcggcaccgccttctccctgttcaagaccgacgaggacatcaccggccggctgaaggaccgggtgcagcccgagatcctggaggccctgctgaagcacatctccttcgacaagttcgtgcagatctccctgaaggccctgcggcggatcgtgcccctgatggagcagggcaagcggtacgacgaggcctgcgccgagatctacggcgaccactacggcaagaagaacaccgaggagaagatctacctgccccccatccccgccgacgagatccggaaccccgtggtgctgcgggccctgtcccaggcccggaaggtgatcaacggcgtggtgcggcggtacggctcccccgcccggatccacatcgagaccgcccgggaggtgggcaagtccttcaaggaccggaaggagatcgagaagcggcaggaggagaaccggaaggaccgggagaaggccgccgccaagttccgggagtacttccccaacttcgtgggcgagcccaagtccaaggacatcctgaagctgcggctgtacgagcagcagcacggcaagtgcctgtactccggcaaggagatcaacctggtgcggctgaacgagaagggctacgtggagatcgaccacgccctgcccttctcccggacctgggacgactccttcaacaacaaggtgctggtgctgggctccgagaaccagaacaagggcaaccagaccccctacgagtacttcaacggcaaggacaactcccgggagtggcaggagttcaaggcccgggtggagacctcccggttcccccggtccaagaagcagcggatcctgctgcagaagttcgacgaggacggcttcaaggagtgcaacctgaacgacacccggtacgtgaaccgcttcctgtgccagttcgtggccgaccacatcctgctgaccggcaagggcaagcggcgggtgttcgcctccaacggccagatcaccaacctgctgcggggcttctggggcctgcggaaggtgcgggccgagaacgaccggcaccacgccctggacgccgtggtggtggcctgctccaccgtggccatgcagcagaagatcacccggttcgtgcggtacaaggagatgaacgccttcgacggcaagaccatcgacaaggagaccggcaaggtgctgcaccagaagacccacttcccccagccctgggagttcttcgcccaggaggtgatgatccgggtgttcggcaagcccgacggcaagcccgagttcgaggaggccgacacccccgagaagctgcggaccctgctggccgagaagctgtcctcccggcccgaggccgtgcacgagtacgtgacccccctgttcgtgtcccgggcccccaaccggaagatgtccggcgcccacaaggacaccctgcggtccgccaagcggttcgtgaagcacaacgagaagatctccgtgaagcgggtgtggctgaccgagatcaagctggccgacctggagaacatggtgaactacaagaacggccgggagatcgagctgtacgaggccctgaaggcccggctggaggcctacggcggcaacgccaagcaggccttcgaccccaaggacaaccccttctacaagaagggcggccagctggtgaaggccgtgcgggtggagaagacccaggagtccggcgtgctgctgaacaagaagaacgcctacaccatcgccgacaacggcgacatggtgcgggtggacgtgttctgcaaggtggacaagaagggcaagaaccagtacttcatcgtgcccatctacgcctggcaggtggccgagaacatcctgcccgacatcgactgcaagggctaccggatcgacgactcctacaccttctgcttctccctgcacaagtacgacctgatcgccttccagaaggacgagaagtccaaggtggagttcgcctactacatcaactgcgactcctccaacggccggttctacctggcctggcacgacaagggctccaaggagcagcagttccggatctccacccagaacctggtgctgatccagaagtaccaggtgaacgagctgggcaaggagatccggccctgccggctgaagaagcggccccccgtgcggtccggaaagcggaccgccgacggctccgagttcgagtcccccaagaagaagcggaaggtggagtagtgactagcaccagcctcaagaacacccgaatggagtctctaagctacataataccaacttacactttacaaaatgttgtcccccaaaatgtagccattcgtatctgctcctaataaaaagaaagtttcttcacattctctcgagaaaaaaaaaaaatggaaaaaaaaaaaacggaaaaaaaaaaaggtaaaaaaaaaaaatataaaaaaaaaaacataaaaaaaaaaaacgaaaaaaaaaaaacgtaaaaaaaaaaaactcaaaaaaaaaaagataaaaaaaaaaaacctaaaaaaaaaaaatgtaaaaaaaaaaaagggaaaaaaaaaaacgcaaaaaaaaaaaacacaaaaaaaaaaaatgcaaaaaaaaaaaatcgaaaaaaaaaaaatctaaaaaaaaaaaacgaaaaaaaaaaaacccaaaaaaaaaaaagacaaaaaaaaaaaatagaaaaaaaaaaagttaaaaaaaaaaaactgaaaaaaaaaaaatttaaaaaaaaaaaat

SEQ ID NO: 637 - RNA, 4563 nt, synthetic construct
  misc_feature 1..4563: note = Synthetic
  source 1..4563: mol_type = other RNA
gggaagctcagaataaacgctcaactttggccggatctgccaccatggacggctccggcggcggctcccccaagaagaagcggaaggtggaggacaagcggcccgccgccaccaagaaggccggccaggccaagaagaagaagggcggctccggcggcggcgaggcctcccccgcctccggcccccggcacctgatggacccccacatcttcacctccaacttcaacaacggcatcggccggcacaagacctacctgtgctacgaggtggagcggctggacaacggcacctccgtgaagatggaccagcaccggggcttcctgcacaaccaggccaagaacctgctgtgcggcttctacggccggcacgccgagctgcggttcctggacctggtgccctccctgcagctggaccccgcccagatctaccgggtgacctggttcatctcctggtccccctgcttctcctggggctgcgccggcgaggtgcgggccttcctgcaggagaacacccacgtgcggctgcggatcttcgccgcccggatctacgactacgaccccctgtacaaggaggccctgcagatgctgcgggacgccggcgcccaggtgtccatcatgacctacgacgagttcaagcactgctgggacaccttcgtggaccaccagggctgccccttccagccctgggacggcctggacgagcactcccaggccctgtccggccggctgcgggccatcctgcagaaccagggcaactccggctccgagacccccggcacctccgagtccgccacccccgagtccgcagcgttcaaaccaaatcccatcaactacatcctgggcctggccatcggcatcgcctccgtgggctgggccatggtggagatcgacgaggaggagaaccccatccggctgatcgacctgggcgtgcgggtgttcgagcgggccgaggtgcccaagaccggcgactccctggccatggcccggcggctggcccggtccgtgcggcggctgacccggcggcgggcccaccggctgctgcgggcccggcggctgctgaagcgggagggcgtgctgcaggccgccgacttcgacgagaacggcctgatcaagtccctgcccaacaccccctggcagctgcgggccgccgccctggaccggaagctgacccccctggagtggtccgccgtgctgctgcacctgatcaagcaccggggctacctgtcccagcggaagaacgagggcgagaccgccgacaaggagctgggcgccctgctgaagggcgtggccaacaacgcccacgccctgcagaccggcgacttccggacccccgccgagctggccctgaacaagttcgagaaggagtccggccacatccggaaccagcggggcgactactcccacaccttctcccggaaggacctgcaggccgagctgatcctgctgttcgagaagcagaaggagttcggcaacccccacgtgtccggcggcctgaaggagggcatcgagaccctgctgatgacccagcggcccgccctgtccggcgacgccgtgcagaagatgctgggccactgcaccttcgagcccgccgagcccaaggccgccaagaacacctacaccgccgagcggttcatctggctgaccaagctgaacaacctgcggatcctggagcagggctccgagcggcccctgaccgacaccgagcgggccaccctgatggacgagccctaccggaagtccaagctgacctacgcccaggcccggaagctgctgggcctggaggacaccgccttcttcaagggcctgcggtacggcaaggacaacgccgaggcctccaccctgatggagatgaaggcctaccacgccatctcccgggccctggagaaggagggcctgaaggacaagaagtcccccctgaacctgtcctccgagctgcaggacgagatcggcaccgccttctccctgttcaagaccgacgaggacatcaccggccggctgaaggaccgggtgcagcccgagatcctggaggccctgctgaagcacatctccttcgacaagttcgtgcagatctccctgaaggccctgcggcggatcgtgcccctgatggagcagggcaagcggtacgacgaggcctgcgccgagatctacggcgaccactacggcaagaagaacaccgaggagaagatctacctgccccccatccccgccgacgagatccggaaccccgtggtgctgcgggccctgtcccaggcccggaaggtgatcaacggcgtggtgcggcggtacggctcccccgcccggatccacatcgagaccgcccgggaggtgggcaagtccttcaaggaccggaaggagatcgagaagcggcaggaggagaaccggaaggaccgggagaaggccgccgccaagttccgggagtacttccccaacttcgtgggcgagcccaagtccaaggacatcctgaagctgcggctgtacgagcagcagcacggcaagtgcctgtactccggcaaggagatcaacctggtgcggctgaacgagaagggctacgtggagatcgaccacgccctgcccttctcccggacctgggacgactccttcaacaacaaggtgctggtgctgggctccgagaaccagaacaagggcaaccagaccccctacgagtacttcaacggcaaggacaactcccgggagtggcaggagttcaaggcccgggtggagacctcccggttcccccggtccaagaagcagcggatcctgctgcagaagttcgacgaggacggcttcaaggagtgcaacctgaacgacacccggtacgtgaaccgcttcctgtgccagttcgtggccgaccacatcctgctgaccggcaagggcaagcggcgggtgttcgcctccaacggccagatcaccaacctgctgcggggcttctggggcctgcggaaggtgcgggccgagaacgaccggcaccacgccctggacgccgtggtggtggcctgctccaccgtggccatgcagcagaagatcacccggttcgtgcggtacaaggagatgaacgccttcgacggcaagaccatcgacaaggagaccggcaaggtgctgcaccagaagacccacttcccccagccctgggagttcttcgcccaggaggtgatgatccgggtgttcggcaagcccgacggcaagcccgagttcgaggaggccgacacccccgagaagctgcggaccctgctggccgagaagctgtcctcccggcccgaggccgtgcacgagtacgtgacccccctgttcgtgtcccgggcccccaaccggaagatgtccggcgcccacaaggacaccctgcggtccgccaagcggttcgtgaagcacaacgagaagatctccgtgaagcgggtgtggctgaccgagatcaagctggccgacctggagaacatggtgaactacaagaacggccgggagatcgagctgtacgaggccctgaaggcccggctggaggcctacggcggcaacgccaagcaggccttcgaccccaaggacaaccccttctacaagaagggcggccagctggtgaaggccgtgcgggtggagaagacccaggagtccggcgtgctgctgaacaagaagaacgcctacaccatcgccgacaacggcgacatggtgcgggtggacgtgttctgcaaggtggacaagaagggcaagaaccagtacttcatcgtgcccatctacgcctggcaggtggccgagaacatcctgcccgacatcgactgcaagggctaccggatcgacgactcctacaccttctgcttctccctgcacaagtacgacctgatcgccttccagaaggacgagaagtccaaggtggagttcgcctactacatcaactgcgactcctccaacggccggttctacctggcctggcacgacaagggctccaaggagcagcagttccggatctccacccagaacctggtgctgatccagaagtaccaggtgaacgagctgggcaaggagatccggccctgccggctgaagaagcggccccccgtgcggtagtgactagcaccagcctcaagaacacccgaatggagtctctaagctacataataccaacttacactttacaaaatgttgtcccccaaaatgtagccattcgtatctgctcctaataaaaagaaagtttcttcacattctctcgagaaaaaaaaaaaatggaaaaaaaaaaaacggaaaaaaaaaaaggtaaaaaaaaaaaatataaaaaaaaaaacataaaaaaaaaaaacgaaaaaaaaaaaacgtaaaaaaaaaaaactcaaaaaaaaaaagataaaaaaaaaaaacctaaaaaaaaaaaatgtaaaaaaaaaaaagggaaaaaaaaaaacgcaaaaaaaaaaaacacaaaaaaaaaaaatgcaaaaaaaaaaaatcgaaaaaaaaaaaatctaaaaaaaaaaaacgaaaaaaaaaaaacccaaaaaaaaaaaagacaaaaaaaaaaaatagaaaaaaaaaaagttaaaaaaaaaaaactgaaaaaaaaaaaatttaaaaaaaaaaaatctag

SEQ ID NO: 638 - DNA, 4508 bp, synthetic construct
  misc_feature 1..4508: note = Synthetic
  source 1..4508: mol_type = other DNA
gggaagctcagaataaacgctcaactttggccggatctgccaccatggaggcctcccccgcctccggcccccggcacctgatggacccccacatcttcacctccaacttcaacaacggcatcggccggcacaagacctacctgtgctacgaggtggagcggctggacaacggcacctccgtgaagatggaccagcaccggggcttcctgcacaaccaggccaagaacctgctgtgcggcttctacggccggcacgccgagctgcggttcctggacctggtgccctccctgcagctggaccccgcccagatctaccgggtgacctggttcatctcctggtccccctgcttctcctggggctgcgccggcgaggtgcgggccttcctgcaggagaacacccacgtgcggctgcggatcttcgccgcccggatctacgactacgaccccctgtacaaggaggccctgcagatgctgcgggacgccggcgcccaggtgtccatcatgacctacgacgagttcaagcactgctgggacaccttcgtggaccaccagggctgccccttccagccctgggacggcctggacgagcactcccaggccctgtccggccggctgcgggccatcctgcagaaccagggcaactccggctccgagacccccggcacctccgagtccgccacccccgagtccgcagcgttcaaaccaaatcccatcaactacatcctgggcctggccatcggcatcgcctccgtgggctgggccatggtggagatcgacgaggaggagaaccccatccggctgatcgacctgggcgtgcgggtgttcgagcgggccgaggtgcccaagaccggcgactccctggccatggcccggcggctggcccggtccgtgcggcggctgacccggcggcgggcccaccggctgctgcgggcccggcggctgctgaagcgggagggcgtgctgcaggccgccgacttcgacgagaacggcctgatcaagtccctgcccaacaccccctggcagctgcgggccgccgccctggaccggaagctgacccccctggagtggtccgccgtgctgctgcacctgatcaagcaccggggctacctgtcccagcggaagaacgagggcgagaccgccgacaaggagctgggcgccctgctgaagggcgtggccaacaacgcccacgccctgcagaccggcgacttccggacccccgccgagctggccctgaacaagttcgagaaggagtccggccacatccggaaccagcggggcgactactcccacaccttctcccggaaggacctgcaggccgagctgatcctgctgttcgagaagcagaaggagttcggcaacccccacgtgtccggcggcctgaaggagggcatcgagaccctgctgatgacccagcggcccgccctgtccggcgacgccgtgcagaagatgctgggccactgcaccttcgagcccgccgagcccaaggccgccaagaacacctacaccgccgagcggttcatctggctgaccaagctgaacaacctgcggatcctggagcagggctccgagcggcccctgaccgacaccgagcgggccaccctgatggacgagccctaccggaagtccaagctgacctacgcccaggcccggaagctgctgggcctggaggacaccgccttcttcaagggcctgcggtacggcaaggacaacgccgaggcctccaccctgatggagatgaaggcctaccacgccatctcccgggccctggagaaggagggcctgaaggacaagaagtcccccctgaacctgtcctccgagctgcaggacgagatcggcaccgccttctccctgttcaagaccgacgaggacatcaccggccggctgaaggaccgggtgcagcccgagatcctggaggccctgctgaagcacatctccttcgacaagttcgtgcagatctccctgaaggccctgcggcggatcgtgcccctgatggagcagggcaagcggtacgacgaggcctgcgccgagatctacggcgaccactacggcaagaagaacaccgaggagaagatctacctgccccccatccccgccgacgagatccggaaccccgtggtgctgcgggccctgtcccaggcccggaaggtgatcaacggcgtggtgcggcggtacggctcccccgcccggatccacatcgagaccgcccgggaggtgggcaagtccttcaaggaccggaaggagatcgagaagcggcaggaggagaaccggaaggaccgggagaaggccgccgccaagttccgggagtacttccccaacttcgtgggcgagcccaagtccaaggacatcctgaagctgcggctgtacgagcagcagcacggcaagtgcctgtactccggcaaggagatcaacctggtgcggctgaacgagaagggctacgtggagatcgaccacgccctgcccttctcccggacctgggacgactccttcaacaacaaggtgctggtgctgggctccgagaaccagaacaagggcaaccagaccccctacgagtacttcaacggcaaggacaactcccgggagtggcaggagttcaaggcccgggtggagacctcccggttcccccggtccaagaagcagcggatcctgctgcagaagttcgacgaggacggcttcaaggagtgcaacctgaacgacacccggtacgtgaaccgcttcctgtgccagttcgtggccgaccacatcctgctgaccggcaagggcaagcggcgggtgttcgcctccaacggccagatcaccaacctgctgcggggcttctggggcctgcggaaggtgcgggccgagaacgaccggcaccacgccctggacgccgtggtggtggcctgctccaccgtggccatgcagcagaagatcacccggttcgtgcggtacaaggagatgaacgccttcgacggcaagaccatcgacaaggagaccggcaaggtgctgcaccagaagacccacttcccccagccctgggagttcttcgcccaggaggtgatgatccgggtgttcggcaagcccgacggcaagcccgagttcgaggaggccgacacccccgagaagctgcggaccctgctggccgagaagctgtcctcccggcccgaggccgtgcacgagtacgtgacccccctgttcgtgtcccgggcccccaaccggaagatgtccggcgcccacaaggacaccctgcggtccgccaagcggttcgtgaagcacaacgagaagatctccgtgaagcgggtgtggctgaccgagatcaagctggccgacctggagaacatggtgaactacaagaacggccgggagatcgagctgtacgaggccctgaaggcccggctggaggcctacggcggcaacgccaagcaggccttcgaccccaaggacaaccccttctacaagaagggcggccagctggtgaaggccgtgcgggtggagaagacccaggagtccggcgtgctgctgaacaagaagaacgcctacaccatcgccgacaacggcgacatggtgcgggtggacgtgttctgcaaggtggacaagaagggcaagaaccagtacttcatcgtgcccatctacgcctggcaggtggccgagaacatcctgcccgacatcgactgcaagggctaccggatcgacgactcctacaccttctgcttctccctgcacaagtacgacctgatcgccttccagaaggacgagaagtccaaggtggagttcgcctactacatcaactgcgactcctccaacggccggttctacctggcctggcacgacaagggctccaaggagcagcagttccggatctccacccagaacctggtgctgatccagaagtaccaggtgaacgagctgggcaaggagatccggccctgccggctgaagaagcggccccccgtgcggtccggaaagcggaccgccgacggctccgagttcgagtcccccaagaagaagcggaaggtggagtagtgactagcaccagcctcaagaacacccgaatggagtctctaagctacataataccaacttacactttacaaaatgttgtcccccaaaatgtagccattcgtatctgctcctaataaaaagaaagtttcttcacattctctcgagaaaaaaaaaaaatggaaaaaaaaaaaacggaaaaaaaaaaaggtaaaaaaaaaaaatataaaaaaaaaaacataaaaaaaaaaaacgaaaaaaaaaaaacgtaaaaaaaaaaaactcaaaaaaaaaaagataaaaaaaaaaaacctaaaaaaaaaaaatgtaaaaaaaaaaaagggaaaaaaaaaaacgcaaaaaaaaaaaacacaaaaaaaaaaaatgcaaaaaaaaaaaatcgaaaaaaaaaaaatctaaaaaaaaaaaacgaaaaaaaaaaaacccaaaaaaaaaaaagacaaaaaaaaaaaatagaaaaaaaaaaagttaaaaaaaaaaaactgaaaaaaaaaaaatttaaaaaaaaaaaat

SEQ ID NO: 639 - DNA, 3982 bp, synthetic construct
  misc_feature 1..3982: note = Synthetic
  source 1..3982: mol_type = other DNA
gggaagctcagaataaacgctcaactttggccggatctgccaccatgaagctgggctccatcgagttcatcaaggtgaacaagggctccggctccggctccggcgcccccgagtccgccaccgagtccggcggcacctccaccgagtccgagggctccgccggcacctccaccgagtccgagggctccgccggctccgccggctccacctccaccgaggagggcacctccaccgagtccgagggctccgccggcacctccaccgagtccgagggctccgccggcacctccgagtccgccaccgagtccggcggcacctccaccgagtccgagggctcctcctccaccggtgccgccttcaagcccaaccccatcaactacatcctgggcctggacatcggcatcgcctccgtgggctgggccatggtggagatcgacgaggaggagaaccccatccggctgatcgacctgggcgtgcgggtgttcgagcgggccgaggtgcccaagaccggcgactccctggccatggcccggcggctggcccggtccgtgcggcggctgacccggcggcgggcccaccggctgctgcgggcccggcggctgctgaagcgggagggcgtgctgcaggccgccgacttcgacgagaacggcctgatcaagtccctgcccaacaccccctggcagctgcgggccgccgccctggaccggaagctgacccccctggagtggtccgccgtgctgctgcacctgatcaagcaccggggctacctgtcccagcggaagaacgagggcgagaccgccgacaaggagctgggcgccctgctgaagggcgtggccaacaacgcccacgccctgcagaccggcgacttccggacccccgccgagctggccctgaacaagttcgagaaggagtccggccacatccggaaccagcggggcgactactcccacaccttctcccggaaggacctgcaggccgagctgatcctgctgttcgagaagcagaaggagttcggcaacccccacgtgtccggcggcctgaaggagggcatcgagaccctgctgatgacccagcggcccgccctgtccggcgacgccgtgcagaagatgctgggccactgcaccttcgagcccgccgagcccaaggccgccaagaacacctacaccgccgagcggttcatctggctgaccaagctgaacaacctgcggatcctggagcagggctccgagcggcccctgaccgacaccgagcgggccaccctgatggacgagccctaccggaagtccaagctgacctacgcccaggcccggaagctgctgggcctggaggacaccgccttcttcaagggcctgcggtacggcaaggacaacgccgaggcctccaccctgatggagatgaaggcctaccacgccatctcccgggccctggagaaggagggcctgaaggacaagaagtcccccctgaacctgtcctccgagctgcaggacgagatcggcaccgccttctccctgttcaagaccgacgaggacatcaccggccggctgaaggaccgggtgcagcccgagatcctggaggccctgctgaagcacatctccttcgacaagttcgtgcagatctccctgaaggccctgcggcggatcgtgcccctgatggagcagggcaagcggtacgacgaggcctgcgccgagatctacggcgaccactacggcaagaagaacaccgaggagaagatctacctgccccccatccccgccgacgagatccggaaccccgtggtgctgcgggccctgtcccaggcccggaaggtgatcaacggcgtggtgcggcggtacggctcccccgcccggatccacatcgagaccgcccgggaggtgggcaagtccttcaaggaccggaaggagatcgagaagcggcaggaggagaaccggaaggaccgggagaaggccgccgccaagttccgggagtacttccccaacttcgtgggcgagcccaagtccaaggacatcctgaagctgcggctgtacgagcagcagcacggcaagtgcctgtactccggcaaggagatcaacctggtgcggctgaacgagaagggctacgtggagatcgaccacgccctgcccttctcccggacctgggacgactccttcaacaacaaggtgctggtgctgggctccgagaaccagaacaagggcaaccagaccccctacgagtacttcaacggcaaggacaactcccgggagtggcaggagttcaaggcccgggtggagacctcccggttcccccggtccaagaagcagcggatcctgctgcagaagttcgacgaggacggcttcaaggagtgcaacctgaacgacacccggtacgtgaaccgcttcctgtgccagttcgtggccgaccacatcctgctgaccggcaagggcaagcggcgggtgttcgcctccaacggccagatcaccaacctgctgcggggcttctggggcctgcggaaggtgcgggccgagaacgaccggcaccacgccctggacgccgtggtggtggcctgctccaccgtggccatgcagcagaagatcacccggttcgtgcggtacaaggagatgaacgccttcgacggcaagaccatcgacaaggagaccggcaaggtgctgcaccagaagacccacttcccccagccctgggagttcttcgcccaggaggtgatgatccgggtgttcggcaagcccgacggcaagcccgagttcgaggaggccgacacccccgagaagctgcggaccctgctggccgagaagctgtcctcccggcccgaggccgtgcacgagtacgtgacccccctgttcgtgtcccgggcccccaaccggaagatgtccggcgcccacaaggacaccctgcggtccgccaagcggttcgtgaagcacaacgagaagatctccgtgaagcgggtgtggctgaccgagatcaagctggccgacctggagaacatggtgaactacaagaacggccgggagatcgagctgtacgaggccctgaaggcccggctggaggcctacggcggcaacgccaagcaggccttcgaccccaaggacaaccccttctacaagaagggcggccagctggtgaaggccgtgcgggtggagaagacccaggagtccggcgtgctgctgaacaagaagaacgcctacaccatcgccgacaacggcgacatggtgcgggtggacgtgttctgcaaggtggacaagaagggcaagaaccagtacttcatcgtgcccatctacgcctggcaggtggccgagaacatcctgcccgacatcgactgcaagggctaccggatcgacgactcctacaccttctgcttctccctgcacaagtacgacctgatcgccttccagaaggacgagaagtccaaggtggagttcgcctactacatcaactgcgactcctccaacggccggttctacctggcctggcacgacaagggctccaaggagcagcagttccggatctccacccagaacctggtgctgatccagaagtaccaggtgaacgagctgggcaaggagatccggccctgccggctgaagaagcggccccccgtgcggtccggaaagcggaccgccgacggctccgagttcgagtcccccaagaagaagcggaaggtggagtgactagcaccagcctcaagaacacccgaatggagtctctaagctacataataccaacttacactttacaaaatgttgtcccccaaaatgtagccattcgtatctgctcctaataaaaagaaagtttcttcacattctctcgagaaaaaaaaaaaatggaaaaaaaaaaaacggaaaaaaaaaaaaggtaaaaaaaaaaaatataaaaaaaaaaaacataaaaaaaaaaaacgaaaaaaaaaaaacgtaaaaaaaaaaaactcaaaaaaaaaaaagataaaaaaaaaaaacctaaaaaaaaaaaatgtaaaaaaaaaaaagggaaa

SEQ ID NO: 640 - DNA, 3318 bp, synthetic construct
  misc_feature 1..3318: note = Synthetic
  source 1..3318: mol_type = other DNA
atgaccggtgccgccttcaagcccaaccccatcaactacatcctgggcctggacatcggcatcgcctccgtgggctgggccatggtggagatcgacgaggaggagaaccccatccggctgatcgacctgggcgtgcgggtgttcgagcgggccgaggtgcccaagaccggcgactccctggccatggcccggcggctggcccggtccgtgcggcggctgacccggcggcgggcccaccggctgctgcgggcccggcggctgctgaagcgggagggcgtgctgcaggccgccgacttcgacgagaacggcctgatcaagtccctgcccaacaccccctggcagctgcgggccgccgccctggaccggaagctgacccccctggagtggtccgccgtgctgctgcacctgatcaagcaccggggctacctgtcccagcggaagaacgagggcgagaccgccgacaaggagctgggcgccctgctgaagggcgtggccaacaacgcccacgccctgcagaccggcgacttccggacccccgccgagctggccctgaacaagttcgagaaggagtccggccacatccggaaccagcggggcgactactcccacaccttctcccggaaggacctgcaggccgagctgatcctgctgttcgagaagcagaaggagttcggcaacccccacgtgtccggcggcctgaaggagggcatcgagaccctgctgatgacccagcggcccgccctgtccggcgacgccgtgcagaagatgctgggccactgcaccttcgagcccgccgagcccaaggccgccaagaacacctacaccgccgagcggttcatctggctgaccaagctgaacaacctgcggatcctggagcagggctccgagcggcccctgaccgacaccgagcgggccaccctgatggacgagccctaccggaagtccaagctgacctacgcccaggcccggaagctgctgggcctggaggacaccgccttcttcaagggcctgcggtacggcaaggacaacgccgaggcctccaccctgatggagatgaaggcctaccacgccatctcccgggccctggagaaggagggcctgaaggacaagaagtcccccctgaacctgtcctccgagctgcaggacgagatcggcaccgccttctccctgttcaagaccgacgaggacatcaccggccggctgaaggaccgggtgcagcccgagatcctggaggccctgctgaagcacatctccttcgacaagttcgtgcagatctccctgaaggccctgcggcggatcgtgcccctgatggagcagggcaagcggtacgacgaggcctgcgccgagatctacggcgaccactacggcaagaagaacaccgaggagaagatctacctgccccccatccccgccgacgagatccggaaccccgtggtgctgcgggccctgtcccaggcccggaaggtgatcaacggcgtggtgcggcggtacggctcccccgcccggatccacatcgagaccgcccgggaggtgggcaagtccttcaaggaccggaaggagatcgagaagcggcaggaggagaaccggaaggaccgggagaaggccgccgccaagttccgggagtacttccccaacttcgtgggcgagcccaagtccaaggacatcctgaagctgcggctgtacgagcagcagcacggcaagtgcctgtactccggcaaggagatcaacctggtgcggctgaacgagaagggctacgtggagatcgaccacgccctgcccttctcccggacctgggacgactccttcaacaacaaggtgctggtgctgggctccgagaaccagaacaagggcaaccagaccccctacgagtacttcaacggcaaggacaactcccgggagtggcaggagttcaaggcccgggtggagacctcccggttcccccggtccaagaagcagcggatcctgctgcagaagttcgacgaggacggcttcaaggagtgcaacctgaacgacacccggtacgtgaaccgcttcctgtgccagttcgtggccgaccacatcctgctgaccggcaagggcaagcggcgggtgttcgcctccaacggccagatcaccaacctgctgcggggcttctggggcctgcggaaggtgcgggccgagaacgaccggcaccacgccctggacgccgtggtggtggcctgctccaccgtggccatgcagcagaagatcacccggttcgtgcggtacaaggagatgaacgccttcgacggcaagaccatcgacaaggagaccggcaaggtgctgcaccagaagacccacttcccccagccctgggagttcttcgcccaggaggtgatgatccgggtgttcggcaagcccgacggcaagcccgagttcgaggaggccgacacccccgagaagctgcggaccctgctggccgagaagctgtcctcccggcccgaggccgtgcacgagtacgtgacccccctgttcgtgtcccgggcccccaaccggaagatgtccggcgcccacaaggacaccctgcggtccgccaagcggttcgtgaagcacaacgagaagatctccgtgaagcgggtgtggctgaccgagatcaagctggccgacctggagaacatggtgaactacaagaacggccgggagatcgagctgtacgaggccctgaaggcccggctggaggcctacggcggcaacgccaagcaggccttcgaccccaaggacaaccccttctacaagaagggcggccagctggtgaaggccgtgcgggtggagaagacccaggagtccggcgtgctgctgaacaagaagaacgcctacaccatcgccgacaacggcgacatggtgcgggtggacgtgttctgcaaggtggacaagaagggcaagaaccagtacttcatcgtgcccatctacgcctggcaggtggccgagaacatcctgcccgacatcgactgcaagggctaccggatcgacgactcctacaccttctgcttctccctgcacaagtacgacctgatcgccttccagaaggacgagaagtccaaggtggagttcgcctactacatcaactgcgactcctccaacggccggttctacctggcctggcacgacaagggctccaaggagcagcagttccggatctccacccagaacctggtgctgatccagaagtaccaggtgaacgagctgggcaaggagatccggccctgccggctgaagaagcggccccccgtgcggtccggaaagcggaccgccgacggctccgagttcgagtcccccaagaagaagcggaaggtggagtag

SEQ ID NO: 641 - DNA, 3318 bp, synthetic construct; identical to SEQ ID NO: 640
  misc_feature 1..3318: note = Synthetic
  source 1..3318: mol_type = other DNA

SEQ ID NO: 642 - DNA, 3318 bp, synthetic construct; identical to SEQ ID NO: 640
  misc_feature 1..3318: note = Synthetic
  source 1..3318: mol_type = other DNA

SEQ ID NO: 643 - DNA, 3318 bp, synthetic construct; identical to SEQ ID NO: 640
  misc_feature 1..3318: note = Synthetic
  source 1..3318: mol_type = other DNA

SEQ ID NO: 644 - DNA, 4782 bp, synthetic construct
  misc_feature 1..4782: note = Synthetic
  source 1..4782: mol_type = other DNA
atggaggcctcccccgcctccggcccccggcacctgatggacccccacatcttcacctccaacttcaacaacggcatcggccggcacaagacctacctgtgctacgaggtggagcggctggacaacggcacctccgtgaagatggaccagcaccggggcttcctgcacaaccaggccaagaacctgctgtgcggcttctacggccggcacgccgagctgcggttcctggacctggtgccctccctgcagctggaccccgcccagatctaccgggtgacctggttcatctcctggtccccctgcttctcctggggctgcgccggcgaggtgcgggccttcctgcaggagaacacccacgtgcggctgcggatcttcgccgcccggatctacgactacgaccccctgtacaaggaggccctgcagatgctgcgggacgccggcgcccaggtgtccatcatgacctacgacgagttcaagcactgctgggacaccttcgtggaccaccagggctgccccttccagccctgggacggcctggacgagcactcccaggccctgtccggccggctgcgggccatcctgcagaaccagggcaactccggctccgagacccccggcacctccgagtccgccacccccgagtccgacaagaagtactccatcggcctggccatcggcaccaactccgtgggctgggccgtgatcaccgacgagtacaaggtgccctccaagaagttcaaggtgctgggcaacaccgaccggcactccatcaagaagaacctgatcggcgccctgctgttcgactccggcgagaccgccgaggccacccggctgaagcggaccgcccggcggcggtacacccggcggaagaaccggatctgctacctgcaggagatcttctccaacgagatggccaaggtggacgactccttcttccaccggctggaggagtccttcctggtggaggaggacaagaagcacgagcggcaccccatcttcggcaacatcgtggacgaggtggcctaccacgagaagtaccccaccatctaccacctgcggaagaagctggtggactccaccgacaaggccgacctgcggctgatctacctggccctggcccacatgatcaagttccggggccacttcctgatcgagggcgacctgaaccccgacaactccgacgtggacaagctgttcatccagctggtgcagacctacaaccagctgttcgaggagaaccccatcaacgcctccggcgtggacgccaaggccatcctgtccgcccggctgtccaagtcccggcggctggagaacctgatcgcccagctgcccggcgagaagaagaacggcctgttcggcaacctgatcgccctgtccctgggcctgacccccaacttcaagtccaacttcgacctggccgaggacgccaagctgcagctgtccaaggacacctacgacgacgacctggacaacctgctggcccagatcggcgaccagtacgccgacctgttcctggccgccaagaacctgtccgacgccatcctgctgtccgacatcctgcgggtgaacaccgagatcaccaaggcccccctgtccgcctccatgatcaagcggtacgacgagcaccaccaggacctgaccctgctgaaggccctggtgcggcagcagctgcccgagaagtacaaggagatcttcttcgaccagtccaagaacggctacgccggctacatcgacggcggcgcctcccaggaggagttctacaagttcatcaagcccatcctggagaagatggacggcaccgaggagctgctggtgaagctgaaccgggaggacctgctgcggaagcagcggaccttcgacaacggctccatcccccaccagatccacctgggcgagctgcacgccatcctgcggcggcaggaggacttctaccccttcctgaaggacaaccgggagaagatcgagaagatcctgaccttccggatcccctactacgtgggccccctggcccggggcaactcccggttcgcctggatgacccggaagtccgaggagaccatcaccccctggaacttcgaggaggtggtggacaagggcgcctccgcccagtccttcatcgagcggatgaccaacttcgacaagaacctgcccaacgagaaggtgctgcccaagcactccctgctgtacgagtacttcaccgtgtacaacgagctgaccaaggtgaagtacgtgaccgagggcatgcggaagcccgccttcctgtccggcgagcagaagaaggccatcgtggacctgctgttcaagaccaaccggaaggtgaccgtgaagcagctgaaggaggactacttcaagaagatcgagtgcttcgactccgtggagatctccggcgtggaggaccggttcaacgcctccctgggcacctaccacgacctgctgaagatcatcaaggacaaggacttcctggacaacgaggagaacgaggacatcctggaggacatcgtgctgaccctgaccctgttcgaggaccgggagatgatcgaggagcggctgaagacctacgcccacctgttcgacgacaaggtgatgaagcagctgaagcggcggcggtacaccggctggggccggctgtcccggaagctgatcaacggcatccgggacaagcagtccggcaagaccatcctggacttcctgaagtccgacggcttcgccaaccggaacttcatgcagctgatccacgacgactccctgaccttcaaggaggacatccagaaggcccaggtgtccggccagggcgactccctgcacgagcacatcgccaacctggccggctcccccgccatcaagaagggcatcctgcagaccgtgaaggtggtggacgagctggtgaaggtgatgggccggcacaagcccgagaacatcgtgatcgagatggcccgggagaaccagaccacccagaagggccagaagaactcccgggagcggatgaagcggatcgaggagggcatcaaggagctgggctcccagatcctgaaggagcaccccgtggagaacacccagctgcagaacgagaagctgtacctgtactacctgcagaacggccgggacatgtacgtggaccaggagctggacatcaaccggctgtccgactacgacgtggaccacatcgtgccccagtccttcctgaaggacgactccatcgacaacaaggtgctgacccggtccgacaagaaccggggcaagtccgacaacgtgccctccgaggaggtggtgaagaagatgaagaactactggcggcagctgctgaacgccaagctgatcacccagcggaagttcgacaacctgaccaaggccgagcggggcggcctgtccgagctggacaaggccggcttcatcaagcggcagctggtggagacccggcagatcaccaagcacgtggcccagatcctggactcccggatgaacaccaagtacgacgagaacgacaagctgatccgggaggtgaaggtgatcaccctgaagtccaagctggtgtccgacttccggaaggacttccagttctacaaggtgcgggagatcaacaactaccaccacgcccacgacgcctacctgaacgccgtggtgggcaccgccctgatcaagaagtaccccaagctggagtccgagttcgtgtacggcgactacaaggtgtacgacgtgcggaagatgatcgccaagtccgagcaggagatcggcaaggccaccgccaagtacttcttctactccaacatcatgaacttcttcaagaccgagatcaccctggccaacggcgagatccggaagcggcccctgatcgagaccaacggcgagaccggcgagatcgtgtgggacaagggccgggacttcgccaccgtgcggaaggtgctgtccatgccccaggtgaacatcgtgaagaagaccgaggtgcagaccggcggcttctccaaggagtccatcctgcccaagcggaactccgacaagctgatcgcccggaagaaggactgggaccccaagaagtacggcggcttcgactcccccaccgtggcctactccgtgctggtggtggccaaggtggagaagggcaagtccaagaagctgaagtccgtgaaggagctgctgggcatcaccatcatggagcggtcctccttcgagaagaaccccatcgacttcctggaggccaagggctacaaggaggtgaagaaggacctgatcatcaagctgcccaagtactccctgttcgagctggagaacggccggaagcggatgctggcctccgccggcgagctgcagaagggcaacgagctggccctgccctccaagtacgtgaacttcctgtacctggcctcccactacgagaagctgaagggctcccccgaggacaacgagcagaagcagctgttcgtggagcagcacaagcactacctggacgagatcatcgagcagatctccgagttctccaagcgggtgatcctggccgacgccaacctggacaaggtgctgtccgcctacaacaagcaccgggacaagcccatccgggagcaggccgagaacatcatccacctgttcaccctgaccaacctgggcgcccccgccgccttcaagtacttcgacaccaccatcgaccggaagcggtacacctccaccaaggaggtgctggacgccaccctgatccaccagtccatcaccggcctgtacgagacccggatcgacctgtcccagctgggcggcgacggcggcggctcccccaagaagaagcggaaggtgtga

SEQ ID NO: 645 - DNA, 3312 bp, synthetic construct
  misc_feature 1..3312: note = Synthetic
  source 1..3312: mol_type = other DNA
atggcagcattcaagccgaactcgatcaactacatcctgggactggacatcggaatcgcatcggtcggatgggcaatggtcgaaatcgacgaagaagaaaacccgatcagactgatcgacctgggagtcagagtcttcgaaagagcagaagtcccgaagacaggagactcgctggcaatggcaagaagactggcaagatcggtcagaagactgacaagaagaagagcacacagactgctgagaacaagaagactgctgaagagagaaggagtcctgcaggcagcaaacttcgacgaaaacggactgatcaagtcgctgccgaacacaccgtggcagctgagagcagcagcactggacagaaagctgacaccgctggaatggtcggcagtcctgctgcacctgatcaagcacagaggatacctgtcgcagagaaagaacgaaggagaaacagcagacaaggaactgggagcactgctgaagggagtcgcaggaaacgcacacgcactgcagacaggagacttcagaacaccggcagaactggcactgaacaagttcgaaaaggaatcgggacacatcagaaaccagagatcggactactcgcacacattctcgagaaaggacctgcaggcagaactgatcctgctgttcgaaaagcagaaggaattcggaaacccgcacgtctcgggaggactgaaggaaggaatcgaaacactgctgatgacacagagaccggcactgtcgggagacgcagtccagaagatgctgggacactgcacattcgaaccggcagaaccgaaggcagcaaagaacacatacacagcagaaagattcatctggctgacaaagctgaacaacctgagaatcctggaacagggatcggaaagaccgctgacagacacagaaagagcaacactgatggacgaaccgtacagaaagtcgaagctgacatacgcacaggcaagaaagctgctgggactggaagacacagcattcttcaagggactgagatacggaaaggacaacgcagaagcatcgacactgatggaaatgaaggcataccacgcaatctcgagagcactggaaaaggaaggactgaaggacaagaagtcgccgctgaacctgtcgccggaactgcaggacgaaatcggaacagcattctcgctgttcaagacagacgaagacatcacaggaagactgaaggacagaatccagccggaaatcctggaagcactgctgaagcacatctcgttcgacaagttcgtccagatctcgctgaaggcactgagaagaatcgtcccgctgatggaacagggaaagagatacgacgaagcatgcgcagaaatctacggagaccactacggaaagaagaacacagaagaaaagatctacctgccgccgatcccggcagacgaaatcagaaacccggtcgtcctgagagcactgtcgcaggcaagaaaggtcatcaacggagtcgtcagaagatacggatcgccggcaagaatccacatcgaaacagcaagagaagtcggaaagtcgttcaaggacagaaaggaaatcgaaaagagacaggaagaaaacagaaaggacagagaaaaggcagcagcaaagttcagagaatacttcccgaacttcgtcggagaaccgaagtcgaaggacatcctgaagctgagactgtacgaacagcagcacggaaagtgcctgtactcgggaaaggaaatcaacctgggaagactgaacgaaaagggatacgtcgaaatcgaccacgcactgccgttctcgagaacatgggacgactcgttcaacaacaaggtcctggtcctgggatcggaaaaccagaacaagggaaaccagacaccgtacgaatacttcaacggaaaggacaactcgagagaatggcaggaattcaaggcaagagtcgaaacatcgagattcccgagatcgaagaagcagagaatcctgctgcagaagttcgacgaagacggattcaaggaaagaaacctgaacgacacaagatacgtcaacagattcctgtgccagttcgtcgcagacagaatgagactgacaggaaagggaaagaagagagtcttcgcatcgaacggacagatcacaaacctgctgagaggattctggggactgagaaaggtcagagcagaaaacgacagacaccacgcactggacgcagtcgtcgtcgcatgctcgacagtcgcaatgcagcagaagatcacaagattcgtcagatacaaggaaatgaacgcattcgacggaaagacaatcgacaaggaaacaggagaagtcctgcaccagaagacacacttcccgcagccgtgggaattcttcgcacaggaagtcatgatcagagtcttcggaaagccggacggaaagccggaattcgaagaagcagacacactggaaaagctgagaacactgctggcagaaaagctgtcgtcgagaccggaagcagtccacgaatacgtcacaccgctgttcgtctcgagagcaccgaacagaaagatgtcgggacagggacacatggaaacagtcaagtcggcaaagagactggacgaaggagtctcggtcctgagagtcccgctgacacagctgaagctgaaggacctggaaaagatggtcaacagagaaagagaaccgaagctgtacgaagcactgaaggcaagactggaagcacacaaggacgacccggcaaaggcattcgcagaaccgttctacaagtacgacaaggcaggaaacagaacacagcaggtcaaggcagtcagagtcgaacaggtccagaagacaggagtctgggtcagaaaccacaacggaatcgcagacaacgcaacaatggtcagagtagacgtcttcgaaaagggagacaagtactacctggtcccgatctactcgtggcaggtcgcaaagggaatcctgccggacagagcagtcgtccagggaaaggacgaagaagactggcagctgatcgacgactcgttcaacttcaagttctcgctgcacccgaacgacctggtcgaagtcatcacaaagaaggcaagaatgttcggatacttcgcatcgtgccacagaggaacaggaaacatcaacatcagaatccacgacctggaccacaagatcggaaagaacggaatcctggaaggaatcggagtcaagacagcactgtcgttccagaagtaccagatcgacgaactgggaaaggaaatcagaccgtgcagactgaagaagagaccgccggtcagatccggaaagagaacagcagacggatcggaattcgaatcgccgaagaagaagagaaaggtcgaatga

SEQ ID NO: 646 - DNA, 327 bp, synthetic construct
  misc_feature 1..327: note = Synthetic
  source 1..327: mol_type = other DNA
atgaccaacctgtccgacatcatcgagaaggagaccggcaagcagctggtgatccaggagtccatcctgatgctgcccgaggaggtggaggaggtgatcggcaacaagcccgagtccgacatcctggtgcacaccgcctacgacgagtccaccgacgagaacgtgatgctgctgacctccgacgcccccgagtacaagccctgggccctggtgatccaggactccaacggcgagaacaagatcaagatgctgtccggcggctccaagcggaccgccgacggctccgagttcgagtcccccaagaagaagcggaaggtggagtgatag

SEQ ID NO: 647 - DNA, 3294 bp, synthetic construct
  misc_feature 1..3294: note = Synthetic
  source 1..3294: mol_type = other DNA
atggccgccttcaagcccaaccccatcaactacatcctgggcctggacatcggcatcgcctccgtgggctgggccatggtggagatcgacgaggaggagaaccccatccggctgatcgacctgggcgtgcgggtgttcgagcgggccgaggtgcccaagaccggcgactccctggccatggcccggcggctggcccggtccgtgcggcggctgacccggcggcgggcccaccggctgctgcgggcccggcggctgctgaagcgggagggcgtgctgcaggccgccgacttcgacgagaacggcctgatcaagtccctgcccaacaccccctggcagctgcgggccgccgccctggaccggaagctgacccccctggagtggtccgccgtgctgctgcacctgatcaagcaccggggctacctgtcccagcggaagaacgagggcgagaccgccgacaaggagctgggcgccctgctgaagggcgtggccaacaacgcccacgccctgcagaccggcgacttccggacccccgccgagctggccctgaacaagttcgagaaggagtccggccacatccggaaccagcggggcgactactcccacaccttctcccggaaggacctgcaggccgagctgatcctgctgttcgagaagcagaaggagttcggcaacccccacgtgtccggcggcctgaaggagggcatcgagaccctgctgatgacccagcggcccgccctgtccggcgacgccgtgcagaagatgctgggccactgcaccttcgagcccgccgagcccaaggccgccaagaacacctacaccgccgagcggttcatctggctgaccaagctgaacaacctgcggatcctggagcagggctccgagcggcccctgaccgacaccgagcgggccaccctgatggacgagccctaccggaagtccaagctgacctacgcccaggcccggaagctgctgggcctggaggacaccgccttcttcaagggcctgcggtacggcaaggacaacgccgaggcctccaccctgatggagatgaaggcctaccacgccatctcccgggccctggagaaggagggcctgaaggacaagaagtcccccctgaacctgtcctccgagctgcaggacgagatcggcaccgccttctccctgttcaagaccgacgaggacatcaccggccggctgaaggaccgggtgcagcccgagatcctggaggccctgctgaagcacatctccttcgacaagttcgtgcagatctccctgaaggccctgcggcggatcgtgcccctgatggagcagggcaagcggtacgacgaggcctgcgccgagatctacggcgaccactacggcaagaagaacaccgaggagaagatctacctgccccccatccccgccgacgagatccggaaccccgtggtgctgcgggccctgtcccaggcccggaaggtgatcaacggcgtggtgcggcggtacggctcccccgcccggatccacatcgagaccgcccgggaggtgggcaagtccttcaaggaccggaaggagatcgagaagcggcaggaggagaaccggaaggaccgggagaaggccgccgccaagttccgggagtacttccccaacttcgtgggcgagcccaagtccaaggacatcctgaagctgcggctgtacgagcagcagcacggcaagtgcctgtactccggcaaggagatcaacctggtgcggctgaacgagaagggctacgtggagatcgaccacgccctgcccttctcccggacctgggacgactccttcaacaacaaggtgctggtgctgggctccgagaaccagaacaagggcaaccagaccccctacgagtacttcaacggcaaggacaactcccgggagtggcaggagttcaaggcccgggtggagacctcccggttcccccggtccaagaagcagcggatcctgctgcagaagttcgacgaggacggcttcaaggagtgcaacctgaacgacacccggtacgtgaaccggttcctgtgccagttcgtggccgaccacatcctgctgaccggcaagggcaagcggcgggtgttcgcctccaacggccagatcaccaacctgctgcggggcttctggggcctgcggaaggtgcgggccgagaacgaccggcaccacgccctggacgccgtggtggtggcctgctccaccgtggccatgcagcagaagatcacccggttcgtgcggtacaaggagatgaacgccttcgacggcaagaccatcgacaaggagaccggcaaggtgctgcaccagaagacccacttcccccagccctgggagttcttcgcccaggaggtgatgatccgggtgttcggcaagcccgacggcaagcccgagttcgaggaggccgacacccccgagaagctgcggaccctgctggccgagaagctgtcctcccggcccgaggccgtgcacgagtacgtgacccccctgttcgtgtcccgggcccccaaccggaagatgtccggcgcccacaaggacaccctgcggtccgccaagcggttcgtgaagcacaacgagaagatctccgtgaagcgggtgtggctgaccgagatcaagctggccgacctggagaacatggtgaactacaagaacggccgggagatcgagctgtacgaggccctgaaggcccggctggaggcctacggcggcaacgccaagcaggccttcgaccccaaggacaaccccttctacaagaagggcggccagctggtgaaggccgtgcgggtggagaagacccaggagtccggcgtgctgctgaacaagaagaacgcctacaccatcgccgacaacggcgacatggtgcgggtggacgtgttctgcaaggtggacaagtccggcggcggctcccccaagaagaagcggaaggtgtccggcggctccggcaagaaccagtacttcatcgtgcccatctacgcctggcaggtggccgagaacatcctgcccgacatcgactgcaagggctaccggatcgacgactcctacaccttctgcttctccctgcacaagtacgacctgatcgccttccagaaggacgagaagtccaaggtggagttcgcctactacatcaactgcgactcctccaacggccggttctacctggcctggcacgacaagggctccaaggagcagcagttccggatctccacccagaacctggtgctgatccagaagtaccaggtgaacgagctgggcaaggagatccggccctgccggctgaagaagcggccccccgtgcggtag

SEQ ID NO: 648 - DNA, 3333 bp, synthetic construct
  misc_feature 1..3333: note = Synthetic
  source 1..3333: mol_type = other DNA
atggtgcccaagaagaagcggaaggtggccgccttcaagcccaaccccatcaactacatcctgggcctggacatcggcatcgcctccgtgggctgggccatggtggagatcgacgaggaggagaaccccatccggctgatcgacctgggcgtgcgggtgttcgagcgggccgaggtgcccaagaccggcgactccctggccatggcccggcggctggcccggtccgtgcggcggctgacccggcggcgggcccaccggctgctgcgggcccggcggctgctgaagcgggagggcgtgctgcaggccgccgacttcgacgagaacggcctgatcaagtccctgcccaacaccccctggcagctgcgggccgccgccctggaccggaagctgacccccctggagtggtccgccgtgctgctgcacctgatcaagcaccggggctacctgtcccagcggaagaacgagggcgagaccgccgacaaggagctgggcgccctgctgaagggcgtggccaacaacgcccacgccctgcagaccggcgacttccggacccccgccgagctggccctgaacaagttcgagaaggagtccggccacatccggaaccagcggggcgactactcccacaccttctcccggaaggacctgcaggccgagctgatcctgctgttcgagaagcagaaggagttcggcaacccccacgtgtccggcggcctgaaggagggcatcgagaccctgctgatgacccagcggcccgccctgtccggcgacgccgtgcagaagatgctgggccactgcaccttcgagcccgccgagcccaaggccgccaagaacacctacaccgccgagcggttcatctggctgaccaagctgaacaacctgcggatcctggagcagggctccgagcggcccctgaccgacaccgagcgggccaccctgatggacgagccctaccggaagtccaagctgacctacgcccaggcccggaagctgctgggcctggaggacaccgccttcttcaagggcctgcggtacggcaaggacaacgccgaggcctccaccctgatggagatgaaggcctaccacgccatctcccgggccctggagaaggagggcctgaaggacaagaagtcccccctgaacctgtcctccgagctgcaggacgagatcggcaccgccttctccctgttcaagaccgacgaggacatcaccggccggctgaaggaccgggtgcagcccgagatcctggaggccctgctgaagcacatctccttcgacaagttcgtgcagatctccctgaaggccctgcggcggatcgtgcccctgatggagcagggcaagcggtacgacgaggcctgcgccgagatctacggcgaccactacggcaagaagaacaccgaggagaagatctacctgccccccatccccgccgacgagatccggaaccccgtggtgctgcgggccctgtcccaggcccggaaggtgatcaacggcgtggtgcggcggtacggctcccccgcccggatccacatcgagaccgcccgggaggtgggcaagtccttcaaggaccggaaggagatcgagaagcggcaggaggagaaccggaaggaccgggagaaggccgccgccaagttccgggagtacttccccaacttcgtgggcgagcccaagtccaaggacatcctgaagctgcggctgtacgagcagcagcacggcaagtgcctgtactccggcaaggagatcaacctggtgcggctgaacgagaagggctacgtggagatcgaccacgccctgcccttctcccggacctgggacgactccttcaacaacaaggtgctggtgctgggctccgagaaccagaacaagggcaaccagaccccctacgagtacttcaacggcaaggacaactcccgggagtggcaggagttcaaggcccgggtggagacctcccggttcccccggtccaagaagcagcggatcctgctgcagaagttcgacgaggacggcttcaaggagtgcaacctgaacgacacccggtacgtgaaccggttcctgtgccagttcgtggccgaccacatcctgctgaccggcaagggcaagcggcgggtgttcgcctccaacggccagatcaccaacctgctgcggggcttctggggcctgcggaaggtgcgggccgagaacgaccggcaccacgccctggacgccgtggtggtggcctgctccaccgtggccatgcagcagaagatcacccggttcgtgcggtacaaggagatgaacgccttcgacggcaagaccatcgacaaggagaccggcaaggtgctgcaccagaagacccacttcccccagccctgggagttcttcgcccaggaggtgatgatccgggtgttcggcaagcccgacggcaagcccgagttcgaggaggccgacacccccgagaagctgcggaccctgctggccgagaagctgtcctcccggcccgaggccgtgcacgagtacgtgacccccctgttcgtgtcccgggcccccaaccggaagatgtccggcgcccacaaggacaccctgcggtccgccaagcggttcgtgaagcacaacgagaagatctccgtgaagcgggtgtggctgaccgagatcaagctggccgacctggagaacatggtgaactacaagaacggccgggagatcgagctgtacgaggccctgaaggcccggctggaggcctacggcggcaacgccaagcaggccttcgaccccaaggacaaccccttctacaagaagggcggccagctggtgaaggccgtgcgggtggagaagacccaggagtccggcgtgctgctgaacaagaagaacgcctacaccatcgccgacaacggcgacatggtgcgggtggacgtgttctgcaaggtggacaagaagggcaagaaccagtacttcatcgtgcccatctacgcctggcaggtggccgagaacatcctgcccgacatcgactgcaagggctaccggatcgacgactcctacaccttctgcttctccctgcacaagtacgacctgatcgccttccagaaggacgagaagtccaaggtggagttcgcctactacatcaactgcgactcctccaacggccggttctacctggcctggcacgacaagggctccaaggagcagcagttccggatctccacccagaacctggtgctgatccagaagtaccaggtgaacgagctgggcaaggagatccggccctgccggctgaagaagcggccccccgtgcggtacccctacgacgtgcccgactacgccgccgcccccgccgccaagaagaagaagctggactag

SEQ ID NO: 649 - DNA, 3246 bp, synthetic construct
  misc_feature 1..3246: note = Synthetic
  source 1..3246: mol_type = other DNA
atggccgccttcaagcccaaccccatcaactacatcctgggcctggacatcggcatcgcctccgtgggctgggccatggtggagatcgacgaggaggagaaccccatccggctgatcgacctgggcgtgcgggtgttcgagcgggccgaggtgcccaagaccggcgactccctggccatggcccggcggctggcccggtccgtgcggcggctgacccggcggcgggcccaccggctgctgcgggcccggcggctgctgaagcgggagggcgtgctgcaggccgccgacttcgacgagaacggcctgatcaagtccctgcccaacaccccctggcagctgcgggccgccgccctggaccggaagctgacccccctggagtggtccgccgtgctgctgcacctgatcaagcaccggggctacctgtcccagcggaagaacgagggcgagaccgccgacaaggagctgggcgccctgctgaagggcgtggccaacaacgcccacgccctgcagaccggcgacttccggacccccgccgagctggccctgaacaagttcgagaaggagtccggccacatccggaaccagcggggcgactactcccacaccttctcccggaaggacctgcaggccgagctgatcctgctgttcgagaagcagaaggagttcggcaacccccacgtgtccggcggcctgaaggagggcatcgagaccctgctgatgacccagcggcccgccctgtccggcgacgccgtgcagaagatgctgggccactgcaccttcgagcccgccgagcccaaggccgccaagaacacctacaccgccgagcggttcatctggctgaccaagctgaacaacctgcggatcctggagcagggctccgagcggcccctgaccgacaccgagcgggccaccctgatggacgagccctaccggaagtccaagctgacctacgcccaggcccggaagctgctgggcctggaggacaccgccttcttcaagggcctgcggtacggcaaggacaacgccgaggcctccaccctgatggagatgaaggcctaccacgccatctcccgggccctggagaaggagggcctgaaggacaagaagtcccccctgaacctgtcctccgagctgcaggacgagatcggcaccgccttctccctgttcaagaccgacgaggacatcaccggccggctgaaggaccgggtgcagcccgagatcctggaggccctgctgaagcacatctccttcgacaagttcgtgcagatctccctgaaggccctgcggcggatcgtgcccctgatggagcagggcaagcggtacgacgaggcctgcgccgagatctacggcgaccactacggcaagaagaacaccgaggagaagatctacctgccccccatccccgccgacgagatccggaaccccgtggtgctgcgggccctgtcccaggcccggaaggtgatcaacggcgtggtgcggcggtacggctcccccgcccggatccacatcgagaccgcccgggaggtgggcaagtccttcaaggaccggaaggagatcgagaagcggcaggaggagaaccggaaggaccgggagaaggccgccgccaagttccgggagtacttccccaacttcgtgggcgagcccaagtccaaggacatcctgaagctgcggctgtacgagcagcagcacggcaagtgcctgtactccggcaaggagatcaacctggtgcggctgaacgagaagggctacgtggagatcgaccacgccctgcccttctcccggacctgggacgactccttcaacaacaaggtgctggtgctgggctccgagaaccagaacaagggcaaccagaccccctacgagtacttcaacggcaaggacaactcccgggagtggcaggagttcaaggcccgggtggagacctcccggttcccccggtccaagaagcagcggatcctgctgcagaagttcgacgaggacggcttcaaggagtgcaacctgaacgacacccggtacgtgaaccggttcctgtgccagttcgtggccgaccacatcctgctgaccggcaagggcaagcggcgggtgttcgcctccaacggccagatcaccaacctgctgcggggcttctggggcctgcggaaggtgcgggccgagaacgaccggcaccacgccctggacgccgtggtggtggcctgctccaccgtggccatgcagcagaagatcacccggttcgtgcggtacaaggagatgaacgccttcgacggcaagaccatcgacaaggagaccggcaaggtgctgcaccagaagacccacttcccccagccctgggagttcttcgcccaggaggtgatgatccgggtgttcggcaagcccgacggcaagcccgagttcgaggaggccgacacccccgagaagctgcggaccctgctggccgagaagctgtcctcccggcccgaggccgtgcacgagtacgtgacccccctgttcgtgtcccgggcccccaaccggaagatgtccggcgcccacaaggacaccctgcggtccgccaagcggttcgtgaagcacaacgagaagatctccgtgaagcgggtgtggctgaccgagatcaagctggccgacctggagaacatggtgaactacaagaacggccgggagatcgagctgtacgaggccctgaaggcccggctggaggcctacggcggcaacgccaagcaggccttcgaccccaaggacaaccccttctacaagaagggcggccagctggtgaaggccgtgcgggtggagaagacccaggagtccggcgtgctgctgaacaagaagaacgcctacaccatcgccgacaacggcgacatggtgcgggtggacgtgttctgcaaggtggacaagaagggcaagaaccagtacttcatcgtgcccatctacgcctggcaggtggccgagaacatcctgcccgacatcgactgcaagggctaccggatcgacgactcctacaccttctgcttctccctgcacaagtacgacctgatcgccttccagaaggacgagaagtccaaggtggagttcgcctactacatcaactgcgactcctccaacggccggttctacctggcctggcacgacaagggctccaaggagcagcagttccggatctccacccagaacctggtgctgatccagaagtaccaggtgaacgagctgggcaaggagatccggccctgccggctgaagaagcggccccccgtgcgg

SEQ ID NO: 650 - DNA, 3246 bp, synthetic construct; identical to SEQ ID NO: 649
  misc_feature 1..3246: note = Synthetic
  source 1..3246: mol_type = other DNA

SEQ ID NO: 651 - DNA, 3309 bp, synthetic construct
  misc_feature 1..3309: note = Synthetic
  source 1..3309: mol_type = other DNA
atggacggctccggcggcggctcccccaagaagaagcggaaggtgggcggctccggcggcggcgccgccttcaagcccaaccccatcaactacatcctgggcctggacatcggcatcgcctccgtgggctgggccatggtggagatcgacgaggaggagaaccccatccggctgatcgacctgggcgtgcgggtgttcgagcgggccgaggtgcccaagaccggcgactccctggccatggcccggcggctggcccggtccgtgcggcggctgacccggcggcgggcccaccggctgctgcgggcccggcggctgctgaagcgggagggcgtgctgcaggccgccgacttcgacgagaacggcctgatcaagtccctgcccaacaccccctggcagctgcgggccgccgccctggaccggaagctgacccccctggagtggtccgccgtgctgctgcacctgatcaagcaccggggctacctgtcccagcggaagaacgagggcgagaccgccgacaaggagctgggcgccctgctgaagggcgtggccaacaacgcccacgccctgcagaccggcgacttccggacccccgccgagctggccctgaacaagttcgagaaggagtccggccacatccggaaccagcggggcgactactcccacaccttctcccggaaggacctgcaggccgagctgatcctgctgttcgagaagcagaaggagttcggcaacccccacgtgtccggcggcctgaaggagggcatcgagaccctgctgatgacccagcggcccgccctgtccggcgacgccgtgcagaagatgctgggccactgcaccttcgagcccgccgagcccaaggccgccaagaacacctacaccgccgagcggttcatctggctgaccaagctgaacaacctgcggatcctggagcagggctccgagcggcccctgaccgacaccgagcgggccaccctgatggacgagccctaccggaagtccaagctgacctacgcccaggcccggaagctgctgggcctggaggacaccgccttcttcaagggcctgcggtacggcaaggacaacgccgaggcctccaccctgatggagatgaaggcctaccacgccatctcccgggccctggagaaggagggcctgaaggacaagaagtcccccctgaacctgtcctccgagctgcaggacgagatcggcaccgccttctccctgttcaagaccgacgaggacatcaccggccggctgaaggaccgggtgcagcccgagatcctggaggccctgctgaagcacatctccttcgacaagttcgtgcagatctccctgaaggccctgcggcggatcgtgcccctgatggagcagggcaagcggtacgacgaggcctgcgccgagatctacggcgaccactacggcaagaagaacaccgaggagaagatctacctgccccccatccccgccgacgagatccggaaccccgtggtgctgcgggccctgtcccaggcccggaaggtgatcaacggcgtggtgcggcggtacggctcccccgcccggatccacatcgagaccgcccgggaggtgggcaagtccttcaaggaccggaaggagatcgagaagcggcaggaggagaaccggaaggaccgggagaaggccgccgccaagttccgggagtacttccccaacttcgtgggcgagcccaagtccaaggacatcctgaagctgcggctgtacgagcagcagcacggcaagtgcctgtactccggcaaggagatcaacctggtgcggctgaacgagaagggctacgtggagatcgaccacgccctgcccttctcccggacctgggacgactccttcaacaacaaggtgctggtgctgggctccgagaaccagaacaagggcaaccagaccccctacgagtacttcaacggcaaggacaactcccgggagtggcaggagttcaaggcccgggtggagacctcccggttcccccggtccaagaagcagcggatcctgctgcagaagttcgacgaggacggcttcaaggagtgcaacctgaacgacacccggtacgtgaaccggttcctgtgccagttcgtggccgaccacatcctgctgaccggcaagggcaagcggcgggtgttcgcctccaacggccagatcaccaacctgctgcggggcttctggggcctgcggaaggtgcgggccgagaacgaccggcaccacgccctggacgccgtggtggtggcctgctccaccgtggccatgcagcagaagatcacccggttcgtgcggtacaaggagatgaacgccttcgacggcaagaccatcgacaaggagaccggcaaggtgctgcaccagaagacccacttcccccagccctgggagttcttcgcccaggaggtgatgatccgggtgttcggcaagcccgacggcaagcccgagttcgaggaggccgacacccccgagaagctgcggaccctgctggccgagaagctgtcctcccggcccgaggccgtgcacgagtacgtgacccccctgttcgtgtcccgggcccccaaccggaagatgtccggcgcccacaaggacaccctgcggtccgccaagcggttcgtgaagcacaacgagaagatctccgtgaagcgggtgtggctgaccgagatcaagctggccgacctggagaacatggtgaactacaagaacggccgggagatcgagctgtacgaggccctgaaggcccggctggaggcctacggcggcaacgccaagcaggccttcgaccccaaggacaaccccttctacaagaagggcggccagctggtgaaggccgtgcgggtggagaagacccaggagtccggcgtgctgctgaacaagaagaacgcctacaccatcgccgacaacggcgacatggtgcgggtggacgtgttctgcaaggtggacaagaagggcaagaaccagtacttcatcgtgcccatctacgcctggcaggtggccgagaacatcctgcccgacatcgactgcaagggctaccggatcgacgactcctacaccttctgcttctccctgcacaagtacgacctgatcgccttccagaaggacgagaagtccaaggtggagttcgcctactacatcaactgcgactcctccaacggccggttctacctggcctggcacgacaagggctccaaggagcagcagttccggatctccacccagaacctggtgctgatccagaagtaccaggtgaacgagctgggcaaggagatccggccctgccggctgaagaagcggccccccgtgcggtag

SEQ ID NO: 652 - DNA, 3366 bp, synthetic construct
  misc_feature 1..3366: note = Synthetic
  source 1..3366: mol_type = other DNA
atggacggctccggcggcggctcccccaagaagaagcggaaggtgggcggctccggcggcggcgccgccttcaagcccaaccccatcaactacatcctgggcctggacatcggcatcgcctccgtgggctgggccatggtggagatcgacgaggaggagaaccccatccggctgatcgacctgggcgtgcgggtgttcgagcgggccgaggtgcccaagaccggcgactccctggccatggcccggcggctggcccggtccgtgcggcggctgacccggcggcgggcccaccggctgctgcgggcccggcggctgctgaagcgggagggcgtgctgcaggccgccgacttcgacgagaacggcctgatcaagtccctgcccaacaccccctggcagctgcgggccgccgccctggaccggaagctgacccccctggagtggtccgccgtgctgctgcacctgatcaagcaccggggctacctgtcccagcggaagaacgagggcgagaccgccgacaaggagctgggcgccctgctgaagggcgtggccaacaacgcccacgccctgcagaccggcgacttccggacccccgccgagctggccctgaacaagttcgagaaggagtccggccacatccggaaccagcggggcgactactcccacaccttctcccggaaggacctgcaggccgagctgatcctgctgttcgagaagcagaaggagttcggcaacccccacgtgtccggcggcctgaaggagggcatcgagaccctgctgatgacccagcggcccgccctgtccggcgacgccgtgcagaagatgctgggccactgcaccttcgagcccgccgagcccaaggccgccaagaacacctacaccgccgagcggttcatctggctgaccaagctgaacaacctgcggatcctggagcagggctccgagcggcccctgaccgacaccgagcgggccaccctgatggacgagccctaccggaagtccaagctgacctacgcccaggcccggaagctgctgggcctggaggacaccgccttcttcaagggcctgcggtacggcaaggacaacgccgaggcctccaccctgatggagatgaaggcctaccacgccatctcccgggccctggagaaggagggcctgaaggacaagaagtcccccctgaacctgtcctccgagctgcaggacgagatcggcaccgccttctccctgttcaagaccgacgaggacatcaccggccggctgaaggaccgggtgcagcccgagatcctggaggccctgctgaagcacatctccttcgacaagttcgtgcagatctccctgaaggccctgcggcggatcgtgcccctgatggagcagggcaagcggtacgacgaggcctgcgccgagatctacggcgaccactacggcaagaagaacaccgaggagaagatctacctgccccccatccccgccgacgagatccggaaccccgtggtgctgcgggccctgtcccaggcccggaaggtgatcaacggcgtggtgcggcggtacggctcccccgcccggatccacatcgagaccgcccgggaggtgggcaagtccttcaaggaccggaaggagatcgagaagcggcaggaggagaaccggaaggaccgggagaaggccgccgccaagttccgggagtacttccccaacttcgtgggcgagcccaagtccaaggacatcctgaagctgcggctgtacgagcagcagcacggcaagtgcctgtactccggcaaggagatcaacctggtgcggctgaacgagaagggctacgtggagatcgaccacgccctgcccttctcccggacctgggacgactccttcaacaacaaggtgctggtgctgggctccgagaaccagaacaagggcaaccagaccccctacgagtacttcaacggcaaggacaactcccgggagtggcaggagttcaaggcccgggtggagacctcccggttcccccggtccaagaagcagcggatcctgctgcagaagttcgacgaggacggcttcaaggagtgcaacctgaacgacacccggtacgtgaaccggttcctgtgccagttcgtggccgaccacatcctgctgaccggcaagggcaagcggcgggtgttcgcctccaacggccagatcaccaacctgctgcggggcttctggggcctgcggaaggtgcgggccgagaacgaccggcaccacgccctggacgccgtggtggtggcctgctccaccgtggccatgcagcagaagatcacccggttcgtgcggtacaaggagatgaacgccttcgacggcaagaccatcgacaaggagaccggcaaggtgctgcaccagaagacccacttcccccagccctgggagttcttcgcccaggaggtgatgatccgggtgttcggcaagcccgacggcaagcccgagttcgaggaggccgacacccccgagaagctgcggaccctgctggccgagaagctgtcctcccggcccgaggccgtgcacgagtacgtgacccccctgttcgtgtcccgggcccccaaccggaagatgtccggcgcccacaaggacaccctgcggtccgccaagcggttcgtgaagcacaacgagaagatctccgtgaagcgggtgtggctgaccgagatcaagctggccgacctggagaacatggtgaactacaagaacggccgggagatcgagctgtacgaggccctgaaggcccggctggaggcctacggcggcaacgccaagcaggccttcgaccccaaggacaaccccttctacaagaagggcggccagctggtgaaggccgtgcgggtggagaagacccaggagtccggcgtgctgctgaacaagaagaacgcctacaccatcgccgacaacggcgacatggtgcgggtggacgtgttctgcaaggtggacaagaagggcaagaaccagtacttcatcgtgcccatctacgcctggcaggtggccgagaacatcctgcccgacatcgactgcaagggctaccggatcgacgactcctacaccttctgcttctccctgcacaagtacgacctgatcgccttccagaaggacgagaagtccaaggtggagttcgcctactacatcaactgcgactcctccaacggccggttctacctggcctggcacgacaagggctccaaggagcagcagttccggatctccacccagaacctggtgctgatccagaagtaccaggtgaacgagctgggcaaggagatccggccctgccggctgaagaagcggccccccgtgcggtccgagtccgccacccccgagtccgtgtccggctggcggctgttcaagaagatctcctag

SEQ ID NO: 653 - DNA, 3375 bp, synthetic construct
  misc_feature 1..3375: note = Synthetic
  source 1..3375: mol_type = other DNA
atggacggctccggcggcggctcccccaagaagaagcggaaggtgggcggctccggcggcggcgccgccttcaagcccaaccccatcaactacatcctgggcctggacatcggcatcgcctccgtgggctgggccatggtggagatcgacgaggaggagaaccccatccggctgatcgacctgggcgtgcgggtgttcgagcgggccgaggtgcccaagaccggcgactccctggccatggcccggcggctggcccggtccgtgcggcggctgacccggcggcgggcccaccggctgctgcgggcccggcggctgctgaagcgggagggcgtgctgcaggccgccgacttcgacgagaacggcctgatcaagtccctgcccaacaccccctggcagctgcgggccgccgccctggaccggaagctgacccccctggagtggtccgccgtgctgctgcacctgatcaagcaccggggctacctgtcccagcggaagaacgagggcgagaccgccgacaaggagctgggcgccctgctgaagggcgtggccaacaacgcccacgccctgcagaccggcgacttccggacccccgccgagctggccctgaacaagttcgagaaggagtccggccacatccggaaccagcggggcgactactcccacaccttctcccggaaggacctgcaggccgagctgatcctgctgttcgagaagcagaaggagttcggcaacccccacgtgtccggcggcctgaaggagggcatcgagaccctgctgatgacccagcggcccgccctgtccggcgacgccgtgcagaagatgctgggccactgcaccttcgagcccgccgagcccaaggccgccaagaacacctacaccgccgagcggttcatctggctgaccaagctgaacaacctgcggatcctggagcagggctccgagcggcccctgaccgacaccgagcgggccaccctgatggacgagccctaccggaagtccaagctgacctacgcccaggcccggaagctgctgggcctggaggacaccgccttcttcaagggcctgcggtacggcaaggacaacgccgaggcctccaccctgatggagatgaaggcctaccacgccatctcccgggccctggagaaggagggcctgaaggacaagaagtcccccctgaacctgtcctccgagctgcaggacgagatcggcaccgccttctccctgttcaagaccgacgaggacatcaccggccggctgaaggaccgggtgcagcccgagatcctggaggccctgctgaagcacatctccttcgacaagttcgtgcagatctccctgaaggccctgcggcggatcgtgcccctgatggagcagggcaagcggtacgacgaggcctgcgccgagatctacggcgaccactacggcaagaagaacaccgaggagaagatctacctgccccccatccccgccgacgagatccggaaccccgtggtgctgcgggccctgtcccaggcccggaaggtgatcaacggcgtggtgcggcggtacggctcccccgcccggatccacatcgagaccgcccgggaggtgggcaagtccttcaaggaccggaaggagatcgagaagcggcaggaggagaaccggaaggaccgggagaaggccgccgccaagttccgggagtacttccccaacttcgtgggcgagcccaagtccaaggacatcctgaagctgcggctgtacgagcagcagcacggcaagtgcctgtactccggcaaggagatcaacctggtgcggctgaacgagaagggctacgtggagatcgaccacgccctgcccttctcccggacctgggacgactccttcaacaacaaggtgctggtgctgggctccgagaaccagaacaagggcaaccagaccccctacgagtacttcaacggcaaggacaactcccgggagtggcaggagttcaaggcccgggtggagacctcccggttcccccggtccaagaagcagcggatcctgctgcagaagttcgacgaggacggcttcaaggagtgcaacctgaacgacacccggtacgtgaaccggttcctgtgccagttcgtggccgaccacatcctgctgaccggcaagggcaagcggcgggtgttcgcctccaacggccagatcaccaacctgctgcggggcttctggggcctgcggaaggtgcgggccgagaacgaccggcaccacgccctggacgccgtggtggtggcctgctccaccgtggccatgcagcagaagatcacccggttcgtgcggtacaaggagatgaacgccttcgacggcaagaccatcgacaaggagaccggcaaggtgctgcaccagaagacccacttcccccagccctgggagttcttcgcccaggaggtgatgatccgggtgttcggcaagcccgacggcaagcccgagttcgaggaggccgacacccccgagaagctgcggaccctgctggccgagaagctgtcctcccggcccgaggccgtgcacgagtacgtgacccccctgttcgtgtcccgggcccccaaccggaagatgtccggcgcccacaaggacaccctgcggtccgccaagcggttcgtgaagcacaacgagaagatctccgtgaagcgggtgtggctgaccgagatcaagctggccgacctggagaacatggtgaactacaagaacggccgggagatcgagctgtacgaggccctgaaggcccggctggaggcctacggcggcaacgccaagcaggccttcgaccccaaggacaaccccttctacaagaagggcggccagctggtgaaggccgtgcgggtggagaagacccaggagtccggcgtgctgctgaacaagaagaacgcctacaccatcgccgacaacggcgacatggtgcgggtggacgtgttctgcaaggtggacaagaagggcaagaaccagtacttcatcgtgcccatctacgcctggcaggtggccgagaacatcctgcccgacatcgactgcaagggctaccggatcgacgactcctacaccttctgcttctccctgcacaagtacgacctgatcgccttccagaaggacgagaagtccaaggtggagttcgcctactacatcaactgcgactcctccaacggccggttctacctggcctggcacgacaagggctccaaggagcagcagttccggatctccacccagaacctggtgctgatccagaagtaccaggtgaacgagctgggcaaggagatccggccctgccggctgaagaagcggccccccgtgcggtccggaaagcggaccgccgacggctccggaggaggaagccccgccgccaagaagaagaagctggactag

SEQ ID NO: 654 - DNA, 3363 bp, synthetic construct
  misc_feature 1..3363: note = Synthetic
  source 1..3363: mol_type = other DNA
atggacggctccggcggcggctcccccaagaagaagcggaaggtggaggacaagcggcccgccgccaccaagaaggccggccaggccaagaagaagaagggcggctccggcggcggcgccgccttcaagcccaaccccatcaactacatcctgggcctggacatcggcatcgcctccgtgggctgggccatggtggagatcgacgaggaggagaaccccatccggctgatcgacctgggcgtgcgggtgttcgagcgggccgaggtgcccaagaccggcgactccctggccatggcccggcggctggcccggtccgtgcggcggctgacccggcggcgggcccaccggctgctgcgggcccggcggctgctgaagcgggagggcgtgctgcaggccgccgacttcgacgagaacggcctgatcaagtccctgcccaacaccccctggcagctgcgggccgccgccctggaccggaagctgacccccctggagtggtccgccgtgctgctgcacctgatcaagcaccggggctacctgtcccagcggaagaacgagggcgagaccgccgacaaggagctgggcgccctgctgaagggcgtggccaacaacgcccacgccctgcagaccggcgacttccggacccccgccgagctggccctgaacaagttcgagaaggagtccggccacatccggaaccagcggggcgactactcccacaccttctcccggaaggacctgcaggccgagctgatcctgctgttcgagaagcagaaggagttcggcaacccccacgtgtccggcggcctgaaggagggcatcgagaccctgctgatgacccagcggcccgccctgtccggcgacgccgtgcagaagatgctgggccactgcaccttcgagcccgccgagcccaaggccgccaagaacacctacaccgccgagcggttcatctggctgaccaagctgaacaacctgcggatcctggagcagggctccgagcggcccctgaccgacaccgagcgggccaccctgatggacgagccctaccggaagtccaagctgacctacgcccaggcccggaagctgctgggcctggaggacaccgccttcttcaagggcctgcggtacggcaaggacaacgccgaggcctccaccctgatggagatgaaggcctaccacgccatctcccgggccctggagaaggagggcctgaaggacaagaagtcccccctgaacctgtcctccgagctgcaggacgagatcggcaccgccttctccctgttcaagaccgacgaggacatcaccggccggctgaaggaccgggtgcagcccgagatcctggaggccctgctgaagcacatctccttcgacaagttcgtgcagatctccctgaaggccctgcggcggatcgtgcccctgatggagcagggcaagcggtacgacgaggcctgcgccgagatctacggcgaccactacggcaagaagaacaccgaggagaagatctacctgccccccatccccgccgacgagatccggaaccccgtggtgctgcgggccctgtcccaggcccggaaggtgatcaacggcgtggtgcggcggtacggctcccccgcccggatccacatcgagaccgcccgggaggtgggcaagtccttcaaggaccggaaggagatcgagaagcggcaggaggagaaccggaaggaccgggagaaggccgccgccaagttccgggagtacttccccaacttcgtgggcgagcccaagtccaaggacatcctgaagctgcggctgtacgagcagcagcacggcaagtgcctgtactccggcaaggagatcaacctggtgcggctgaacgagaagggctacgtggagatcgaccacgccctgcccttctcccggacctgggacgactccttcaacaacaaggtgctggtgctgggctccgagaaccagaacaagggcaaccagaccccctacgagtacttcaacggcaaggacaactcccgggagtggcaggagttcaaggcccgggtggagacctcccggttcccccggtccaagaagcagcggatcctgctgcagaagttcgacgaggacggcttcaaggagtgcaacctgaacgacacccggtacgtgaaccggttcctgtgccagttcgtggccgaccacatcctgctgaccggcaagggcaagcggcgggtgttcgcctccaacggccagatcaccaacctgctgcggggcttctggggcctgcggaaggtgcgggccgagaacgaccggcaccacgccctggacgccgtggtggtggcctgctccaccgtggccatgcagcagaagatcacccggttcgtgcggtacaaggagatgaacgccttcgacggcaagaccatcgacaaggagaccggcaaggtgctgcaccagaagacccacttcccccagccctgggagttcttcgcccaggaggtgatgatccgggtgttcggcaagcccgacggcaagcccgagttcgaggaggccgacacccccgagaagctgcggaccctgctggccgagaagctgtcctcccggcccgaggccgtgcacgagtacgtgacccccctgttcgtgtcccgggcccccaaccggaagatgtccggcgcccacaaggacaccctgcggtccgccaagcggttcgtgaagcacaacgagaagatctccgtgaagcgggtgtggctgaccgagatcaagctggccgacctggagaacatggtgaactacaagaacggccgggagatcgagctgtacgaggccctgaaggcccggctggaggcctacggcggcaacgccaagcaggccttcgaccccaaggacaaccccttctacaagaagggcggccagctggtgaaggccgtgcgggtggagaagacccaggagtccggcgtgctgctgaacaagaagaacgcctacaccatcgccgacaacggcgacatggtgcgggtggacgtgttctgcaaggtggacaagaagggcaagaaccagtacttcatcgtgcccatctacgcctggcaggtggccgagaacatcctgcccgacatcgactgcaagggctaccggatcgacgactcctacaccttctgcttctccctgcacaagtacgacctgatcgccttccagaaggacgagaagtccaaggtggagttcgcctactacatcaactgcgactcctccaacggccggttctacctggcctggcacgacaagggctccaaggagcagcagttccggatctccacccagaacctggtgctgatccagaagtaccaggtgaacgagctgggcaaggagatccggccctgccggctgaagaagcggccccccgtgcggtag

SEQ ID NO: 655 - DNA, 3420 bp, synthetic construct
  misc_feature 1..3420: note = Synthetic
  source 1..3420: mol_type = other DNA
atggacggctccggcggcggctcccccaagaagaagcggaaggtggaggacaagcggcccgccgccaccaagaaggccggccaggccaagaagaagaagggcggctccggcggcggcgccgccttcaagcccaaccccatcaactacatcctgggcctggacatcggcatcgcctccgtgggctgggccatggtggagatcgacgaggaggagaaccccatccggctgatcgacctgggcgtgcgggtgttcgagcgggccgaggtgcccaagaccggcgactccctggccatggcccggcggctggcccggtccgtgcggcggctgacccggcggcgggcccaccggctgctgcgggcccggcggctgctgaagcgggagggcgtgctgcaggccgccgacttcgacgagaacggcctgatcaagtccctgcccaacaccccctggcagctgcgggccgccgccctggaccggaagctgacccccctggagtggtccgccgtgctgctgcacctgatcaagcaccggggctacctgtcccagcggaagaacgagggcgagaccgccgacaaggagctgggcgccctgctgaagggcgtggccaacaacgcccacgccctgcagaccggcgacttccggacccccgccgagctggccctgaacaagttcgagaaggagtccggccacatccggaaccagcggggcgactactcccacaccttctcccggaaggacctgcaggccgagctgatcctgctgttcgagaagcagaaggagttcggcaacccccacgtgtccggcggcctgaaggagggcatcgagaccctgctgatgacccagcggcccgccctgtccggcgacgccgtgcagaagatgctgggccactgcaccttcgagcccgccgagcccaaggccgccaagaacacctacaccgccgagcggttcatctggctgaccaagctgaacaacctgcggatcctggagcagggctccgagcggcccctgaccgacaccgagcgggccaccctgatggacgagccctaccggaagtccaagctgacctacgcccaggcccggaagctgctgggcctggaggacaccgccttcttcaagggcctgcggtacggcaaggacaacgccgaggcctccaccctgatggagatgaaggcctaccacgccatctcccgggccctggagaaggagggcctgaaggacaagaagtcccccctgaacctgtcctccgagctgcaggacgagatcggcaccgccttctccctgttcaagaccgacgaggacatcaccggccggctgaaggaccgggtgcagcccgagatcctggaggccctgctgaagcacatctccttcgacaagttcgtgcagatctccctgaaggccctgcggcggatcgtgcccctgatggagcagggcaagcggtacgacgaggcctgcgccgagatctacggcgaccactacggcaagaagaacaccgaggagaagatctacctgccccccatccccgccgacgagatccggaaccccgtggtgctgcgggccctgtcccaggcccggaaggtgatcaacggcgtggtgcggcggtacggctcccccgcccggatccacatcgagaccgcccgggaggtgggcaagtccttcaaggaccggaaggagatcgagaagcggcaggaggagaaccggaaggaccgggagaaggccgccgccaagttccgggagtacttccccaacttcgtgggcgagcccaagtccaaggacatcctgaagctgcggctgtacgagcagcagcacggcaagtgcctgtactccggcaaggagatcaacctggtgcggctgaacgagaagggctacgtggagatcgaccacgccctgcccttctcccggacctgggacgactccttcaacaacaaggtgctggtgctgggctccgagaaccagaacaagggcaaccagaccccctacgagtacttcaacggcaaggacaactcccgggagtggcaggagttcaaggcccgggtggagacctcccggttcccccggtccaagaagcagcggatcctgctgcagaagttcgacgaggacggcttcaaggagtgcaacctgaacgacacccggtacgtgaaccggttcctgtgccagttcgtggccgaccacatcctgctgaccggcaagggcaagcggcgggtgttcgcctccaacggccagatcaccaacctgctgcggggcttctggggcctgcggaaggtgcgggccgagaacgaccggcaccacgccctggacgccgtggtggtggcctgctccaccgtggccatgcagcagaagatcacccggttcgtgcggtacaaggagatgaacgccttcgacggcaagaccatcgacaaggagaccggcaaggtgctgcaccagaagacccacttcccccagccctgggagttcttcgcccaggaggtgatgatccgggtgttcggcaagcccgacggcaagcccgagttcgaggaggccgacacccccgagaagctgcggaccctgctggccgagaagctgtcctcccggcccgaggccgtgcacgagtacgtgacccccctgttcgtgtcccgggcccccaaccggaagatgtccggcgcccacaaggacaccctgcggtccgccaagcggttcgtgaagcacaacgagaagatctccgtgaagcgggtgtggctgaccgagatcaagctggccgacctggagaacatggtgaactacaagaacggccgggagatcgagctgtacgaggccctgaaggcccggctggaggcctacggcggcaacgccaagcaggccttcgaccccaaggacaaccccttctacaagaagggcggccagctggtgaaggccgtgcgggtggagaagacccaggagtccggcgtgctgctgaacaagaagaacgcctacaccatcgccgacaacggcgacatggtgcgggtggacgtgttctgcaaggtggacaagaagggcaagaaccagtacttcatcgtgcccatctacgcctggcaggtggccgagaacatcctgcccgacatcgactgcaagggctaccggatcgacgactcctacaccttctgcttctccctgcacaagtacgacctgatcgccttccagaaggacgagaagtccaaggtggagttcgcctactacatcaactgcgactcctccaacggccggttctacctggcctggcacgacaagggctccaaggagcagcagttccggatctccacccagaacctggtgctgatccagaagtaccaggtgaacgagctgggcaaggagatccggccctgccggctgaagaagcggccccccgtgcggtccgagtccgccacccccgagtccgtgtccggctggcggctgttcaagaagatctcctag

SEQ ID NO: 656 - DNA, 3342 bp, synthetic construct
  misc_feature 1..3342: note = Synthetic
  source 1..3342: mol_type = other DNA
atggacggctccggcggcggctccgaggacaagcggcccgccgccaccaagaaggccggccaggccaagaagaagaagggcggctccggcggcggcgccgccttcaagcccaaccccatcaactacatcctgggcctggacatcggcatcgcctccgtgggctgggccatggtggagatcgacgaggaggagaaccccatccggctgatcgacctgggcgtgcgggtgttcgagcgggccgaggtgcccaagaccggcgactccctggccatggcccggcggctggcccggtccgtgcggcggctgacccggcggcgggcccaccggctgctgcgggcccggcggctgctgaagcgggagggcgtgctgcaggccgccgacttcgacgagaacggcctgatcaagtccctgcccaacaccccctggcagctgcgggccgccgccctggaccggaagctgacccccctggagtggtccgccgtgctgctgcacctgatcaagcaccggggctacctgtcccagcggaagaacgagggcgagaccgccgacaaggagctgggcgccctgctgaagggcgtggccaacaacgcccacgccctgcagaccggcgacttccggacccccgccgagctggccctgaacaagttcgagaaggagtccggccacatccggaaccagcggggcgactactcccacaccttctcccggaaggacctgcaggccgagctgatcctgctgttcgagaagcagaaggagttcggcaacccccacgtgtccggcggcctgaaggagggcatcgagaccctgctgatgacccagcggcccgccctgtccggcgacgccgtgcagaagatgctgggccactgcaccttcgagcccgccgagcccaaggccgccaagaacacctacaccgccgagcggttcatctggctgaccaagctgaacaacctgcggatcctggagcagggctccgagcggcccctgaccgacaccgagcgggccaccctgatggacgagccctaccggaagtccaagctgacctacgcccaggcccggaagctgctgggcctggaggacaccgccttcttcaagggcctgcggtacggcaaggacaacgccgaggcctccaccctgatggagatgaaggcctaccacgccatctcccgggccctggagaaggagggcctgaaggacaagaagtcccccctgaacctgtcctccgagctgcaggacgagatcggcaccgccttctccctgttcaagaccgacgaggacatcaccggccggctgaaggaccgggtgcagcccgagatcctggaggccctgctgaagcacatctccttcgacaagttcgtgcagatctccctgaaggccctgcggcggatcgtgcccctgatggagcagggcaagcggtacgacgaggcctgcgccgagatctacggcgaccactacggcaagaagaacaccgaggagaagatctacctgccccccatccccgccgacgagatccggaaccccgtggtgctgcgggccctgtcccaggcccggaaggtgatcaacggcgtggtgcggcggtacggctcccccgcccggatccacatcgagaccgcccgggaggtgggcaagtccttcaaggaccggaaggagatcgagaagcggcaggaggagaaccggaaggaccgggagaaggccgccgccaagttccgggagtacttccccaacttcgtgggcgagcccaagtccaaggacatcctgaagctgcggctgtacgagcagcagcacggcaagtgcctgtactccggcaaggagatcaacctggtgcggctgaacgagaagggctacgtggagatcgaccacgccctgcccttctcccggacctgggacgactccttcaacaacaaggtgctggtgctgggctccgagaaccagaacaagggcaaccagaccccctacgagtacttcaacggcaaggacaactcccgggagtggcaggagttcaaggcccgggtggagacctcccggttcccccggtccaagaagcagcggatcctgctgcagaagttcgacgaggacggcttcaaggagtgcaacctgaacgacacccggtacgtgaaccggttcctgtgccagttcgtggccgaccacatcctgctgaccggcaagggcaagcggcgggtgttcgcctccaacggccagatcaccaacctgctgcggggcttctggggcctgcggaaggtgcgggccgagaacgaccggcaccacgccctggacgccgtggtggtggcctgctccaccgtggccatgcagcagaagatcacccggttcgtgcggtacaaggagatgaacgccttcgacggcaagaccatcgacaaggagaccggcaaggtgctgcaccagaagacccacttcccccagccctgggagttcttcgcccaggaggtgatgatccgggtgttcggcaagcccgacggcaagcccgagttcgaggaggccgacacccccgagaagctgcggaccctgctggccgagaagctgtcctcccggcccgaggccgtgcacgagtacgtgacccccctgttcgtgtcccgggcccccaaccggaagatgtccggcgcccacaaggacaccctgcggtccgccaagcggttcgtgaagcacaacgagaagatctccgtgaagcgggtgtggctgaccgagatcaagctggccgacctggagaacatggtgaactacaagaacggccgggagatcgagctgtacgaggccctgaaggcccggctggaggcctacggcggcaacgccaagcaggccttcgaccccaaggacaaccccttctacaagaagggcggccagctggtgaaggccgtgcgggtggagaagacccaggagtccggcgtgctgctgaacaagaagaacgcctacaccatcgccgacaacggcgacatggtgcgggtggacgtgttctgcaaggtggacaagaagggcaagaaccagtacttcatcgtgcccatctacgcctggcaggtggccgagaacatcctgcccgacatcgactgcaagggctaccggatcgacgactcctacaccttctgcttctccctgcacaagtacgacctgatcgccttccagaaggacgagaagtccaaggtggagttcgcctactacatcaactgcgactcctccaacggccggttctacctggcctggcacgacaagggctccaaggagcagcagttccggatctccacccagaacctggtgctgatccagaagtaccaggtgaacgagctgggcaaggagatccggccctgccggctgaagaagcggccccccgtgcggtag

SEQ ID NO: 657 - DNA, 4068 bp, synthetic construct
  misc_feature 1..4068: note = Synthetic
  source 1..4068: mol_type = other DNA
atggacggctccggcggcggctcccccaagaagaagcggaaggtggaggacaagcggcccgccgccaccaagaaggccggccaggccaagaagaagaagggcggctccggcggcggcgaggcctcccccgcctccggcccccggcacctgatggacccccacatcttcacctccaacttcaacaacggcatcggccggcacaagacctacctgtgctacgaggtggagcggctggacaacggcacctccgtgaagatggaccagcaccggggcttcctgcacaaccaggccaagaacctgctgtgcggcttctacggccggcacgccgagctgcggttcctggacctggtgccctccctgcagctggaccccgcccagatctaccgggtgacctggttcatctcctggtccccctgcttctcctggggctgcgccggcgaggtgcgggccttcctgcaggagaacacccacgtgcggctgcggatcttcgccgcccggatctacgactacgaccccctgtacaaggaggccctgcagatgctgcgggacgccggcgcccaggtgtccatcatgacctacgacgagttcaagcactgctgggacaccttcgtggaccaccagggctgccccttccagccctgggacggcctggacgagcactcccaggccctgtccggccggctgcgggccatcctgcagaaccagggcaactccggctccgagacccccggcacctccgagtccgccacccccgagtccgcagcgttcaaaccaaatcccatcaactacatcctgggcctggccatcggcatcgcctccgtgggctgggccatggtggagatcgacgaggaggagaaccccatccggctgatcgacctgggcgtgcgggtgttcgagcgggccgaggtgcccaagaccggcgactccctggccatggcccggcggctggcccggtccgtgcggcggctgacccggcggcgggcccaccggctgctgcgggcccggcggctgctgaagcgggagggcgtgctgcaggccgccgacttcgacgagaacggcctgatcaagtccctgcccaacaccccctggcagctgcgggccgccgccctggaccggaagctgacccccctggagtggtccgccgtgctgctgcacctgatcaagcaccggggctacctgtcccagcggaagaacgagggcgagaccgccgacaaggagctgggcgccctgctgaagggcgtggccaacaacgcccacgccctgcagaccggcgacttccggacccccgccgagctggccctgaacaagttcgagaaggagtccggccacatccggaaccagcggggcgactactcccacaccttctcccggaaggacctgcaggccgagctgatcctgctgttcgagaagcagaaggagttcggcaacccccacgtgtccggcggcctgaaggagggcatcgagaccctgctgatgacccagcggcccgccctgtccggcgacgccgtgcagaagatgctgggccactgcaccttcgagcccgccgagcccaaggccgccaagaacacctacaccgccgagcggttcatctggctgaccaagctgaacaacctgcggatcctggagcagggctccgagcggcccctgaccgacaccgagcgggccaccctgatggacgagccctaccggaagtccaagctgacctacgcccaggcccggaagctgctgggcctggaggacaccgccttcttcaagggcctgcggtacggcaaggacaacgccgaggcctccaccctgatggagatgaaggcctaccacgccatctcccgggccctggagaaggagggcctgaaggacaagaagtcccccctgaacctgtcctccgagctgcaggacgagatcggcaccgccttctccctgttcaagaccgacgaggacatcaccggccggctgaaggaccgggtgcagcccgagatcctggaggccctgctgaagcacatctccttcgacaagttcgtgcagatctccctgaaggccctgcggcggatcgtgcccctgatggagcagggcaagcggtacgacgaggcctgcgccgagatctacggcgaccactacggcaagaagaacaccgaggagaagatctacctgccccccatccccgccgacgagatccggaaccccgtggtgctgcgggccctgtcccaggcccggaaggtgatcaacggcgtggtgcggcggtacggctcccccgcccggatccacatcgagaccgcccgggaggtgggcaagtccttcaaggaccggaaggagatcgagaagcggcaggaggagaaccggaaggaccgggagaaggccgccgccaagttccgggagtacttccccaacttcgtgggcgagcccaagtccaaggacatcctgaagctgcggctgtacgagcagcagcacggcaagtgcctgtactccggcaaggagatcaacctggtgcggctgaacgagaagggctacgtggagatcgaccacgccctgcccttctcccggacctgggacgactccttcaacaacaaggtgctggtgctgggctccgagaaccagaacaagggcaaccagaccccctacgagtacttcaacggcaaggacaactcccgggagtggcaggagttcaaggcccgggtggagacctcccggttcccccggtccaagaagcagcggatcctgctgcagaagttcgacgaggacggcttcaaggagtgcaacctgaacgacacccggtacgtgaaccgcttcctgtgccagttcgtggccgaccacatcctgctgaccggcaagggcaagcggcgggtgttcgcctccaacggccagatcaccaacctgctgcggggcttctggggcctgcggaaggtgcgggccgagaacgaccggcaccacgccctggacgccgtggtggtggcctgctccaccgtggccatgcagcagaagatcacccggttcgtgcggtacaaggagatgaacgccttcgacggcaagaccatcgacaaggagaccggcaaggtgctgcaccagaagacccacttcccccagccctgggagttcttcgcccaggaggtgatgatccgggtgttcggcaagcccgacggcaagcccgagttcgaggaggccgacacccccgagaagctgcggaccctgctggccgagaagctgtcctcccggcccgaggccgtgcacgagtacgtgacccccctgttcgtgtcccgggcccccaaccggaagatgtccggcgcccacaaggacaccctgcggtccgccaagcggttcgtgaagcacaacgagaagatctccgtgaagcgggtgtggctgaccgagatcaagctggccgacctggagaacatggtgaactacaagaacggccgggagatcgagctgtacgaggccctgaaggcccggctggaggcctacggcggcaacgccaagcaggccttcgaccccaaggacaaccccttctacaagaagggcggccagctggtgaaggccgtgcgggtggagaagacccaggagtccggcgtgctgctgaacaagaagaacgcctacaccatcgccgacaacggcgacatggtgcgggtggacgtgttctgcaaggtggacaagaagggcaagaaccagtacttcatcgtgcccatctacgcctggcaggtggccgagaacatcctgcccgacatcgactgcaagggctaccggatcgacgactcctacaccttctgcttctccctgcacaagtacgacctgatcgccttccagaaggacgagaagtccaaggtggagttcgcctactacatcaactgcgactcctccaacggccggttctacctggcctggcacgacaagggctccaaggagcagcagttccggatctccacccagaacctggtgctgatccagaagtaccaggtgaacgagctgggcaaggagatccggccctgccggctgaagaagcggccccccgtgcggtccggaaagcggaccgccgacggctccgagttcgagtcccccaagaagaagcggaaggtggagtag

SEQ ID NO: 658 - DNA, 4005 bp, synthetic construct
  misc_feature 1..4005: note = Synthetic
  source 1..4005: mol_type = other DNA
atggacggctccggcggcggctcccccaagaagaagcggaaggtggaggacaagcggcccgccgccaccaagaaggccggccaggccaagaagaagaagggcggctccggcggcggcgaggcctcccccgcctccggcccccggcacctgatggacccccacatcttcacctccaacttcaacaacggcatcggccggcacaagacctacctgtgctacgaggtggagcggctggacaacggcacctccgtgaagatggaccagcaccggggcttcctgcacaaccaggccaagaacctgctgtgcggcttctacggccggcacgccgagctgcggttcctggacctggtgccctccctgcagctggaccccgcccagatctaccgggtgacctggttcatctcctggtccccctgcttctcctggggctgcgccggcgaggtgcgggccttcctgcaggagaacacccacgtgcggctgcggatcttcgccgcccggatctacgactacgaccccctgtacaaggaggccctgcagatgctgcgggacgccggcgcccaggtgtccatcatgacctacgacgagttcaagcactgctgggacaccttcgtggaccaccagggctgccccttccagccctgggacggcctggacgagcactcccaggccctgtccggccggctgcgggccatcctgcagaaccagggcaactccggctccgagacccccggcacctccgagtccgccacccccgagtccgcagcgttcaaaccaaatcccatcaactacatcctgggcctggccatcggcatcgcctccgtgggctgggccatggtggagatcgacgaggaggagaaccccatccggctgatcgacctgggcgtgcgggtgttcgagcgggccgaggtgcccaagaccggcgactccctggccatggcccggcggctggcccggtccgtgcggcggctgacccggcggcgggcccaccggctgctgcgggcccggcggctgctgaagcgggagggcgtgctgcaggccgccgacttcgacgagaacggcctgatcaagtccctgcccaacaccccctggcagctgcgggccgccgccctggaccggaagctgacccccctggagtggtccgccgtgctgctgcacctgatcaagcaccggggctacctgtcccagcggaagaacgagggcgagaccgccgacaaggagctgggcgccctgctgaagggcgtggccaacaacgcccacgccctgcagaccggcgacttccggacccccgccgagctggccctgaacaagttcgagaaggagtccggccacatccggaaccagcggggcgactactcccacaccttctcccggaaggacctgcaggccgagctgatcctgctgttcgagaagcagaaggagttcggcaacccccacgtgtccggcggcctgaaggagggcatcgagaccctgctgatgacccagcggcccgccctgtccggcgacgccgtgcagaagatgctgggccactgcaccttcgagcccgccgagcccaaggccgccaagaacacctacaccgccgagcggttcatctggctgaccaagctgaacaacctgcggatcctggagcagggctccgagcggcccctgaccgacaccgagcgggccaccctgatggacgagccctaccggaagtccaagctgacctacgcccaggcccggaagctgctgggcctggaggacaccgccttcttcaagggcctgcggtacggcaaggacaacgccgaggcctccaccctgatggagatgaaggcctaccacgccatctcccgggccctggagaaggagggcctgaaggacaagaagtcccccctgaacctgtcctccgagctgcaggacgagatcggcaccgccttctccctgttcaagaccgacgaggacatcaccggccggctgaaggaccgggtgcagcccgagatcctggaggccctgctgaagcacatctccttcgacaagttcgtgcagatctccctgaaggccctgcggcggatcgtgcccctgatggagcagggcaagcggtacgacgaggcctgcgccgagatctacggcgaccactacggcaagaagaacaccgaggagaagatctacctgccccccatccccgccgacgagatccggaaccccgtggtgctgcgggccctgtcccaggcccggaaggtgatcaacggcgtggtgcggcggtacggctcccccgcccggatccacatcgagaccgcccgggaggtgggcaagtccttcaaggaccggaaggagatcgagaagcggcaggaggagaaccggaaggaccgggagaaggccgccgccaagttccgggagtacttccccaacttcgtgggcgagcccaagtccaaggacatcctgaagctgcggctgtacgagcagcagcacggcaagtgcctgtactccggcaaggagatcaacctggtgcggctgaacgagaagggctacgtggagatcgaccacgccctgcccttctcccggacctgggacgactccttcaacaacaaggtgctggtgctgggctccgagaaccagaacaagggcaaccagaccccctacgagtacttcaacggcaaggacaactcccgggagtggcaggagttcaaggcccgggtggagacctcccggttcccccggtccaagaagcagcggatcctgctgcagaagttcgacgaggacggcttcaaggagtgcaacctgaacgacacccggtacgtgaaccgcttcctgtgccagttcgtggccgaccacatcctgctgaccggcaagggcaagcggcgggtgttcgcctccaacggccagatcaccaacctgctgcggggcttctggggcctgcggaaggtgcgggccgagaacgaccggcaccacgccctggacgccgtggtggtggcctgctccaccgtggccatgcagcagaagatcacccggttcgtgcggtacaaggagatgaacgccttcgacggcaagaccatcgacaaggagaccggcaaggtgctgcaccagaagacccacttcccccagccctgggagttcttcgcccaggaggtgatgatccgggtgttcggcaagcccgacggcaagcccgagttcgaggaggccgacacccccgagaagctgcggaccctgctggccgagaagctgtcctcccggcccgaggccgtgcacgagtacgtgacccccctgttcgtgtcccgggcccccaaccggaagatgtccggcgcccacaaggacaccctgcggtccgccaagcggttcgtgaagcacaacgagaagatctccgtgaagcgggtgtggctgaccgagatcaagctggccgacctggagaacatggtgaactacaagaacggccgggagatcgagctgtacgaggccctgaaggcccggctggaggcctacggcggcaacgccaagcaggccttcgaccccaaggacaaccccttctacaagaagggcggccagctggtgaaggccgtgcgggtggagaagacccaggagtccggcgtgctgctgaacaagaagaacgcctacaccatcgccgacaacggcgacatggtgcgggtggacgtgttctgcaaggtggacaagaagggcaagaaccagtacttcatcgtgcccatctacgcctggcaggtggccgagaacatcctgcccgacatcgactgcaagggctaccggatcgacgactcctacaccttctgcttctccctgcacaagtacgacctgatcgccttccagaaggacgagaagtccaaggtggagttcgcctactacatcaactgcgactcctccaacggccggttctacctggcctggcacgacaagggctccaaggagcagcagttccggatctccacccagaacctggtgctgatccagaagtaccaggtgaacgagctgggcaaggagatccggccctgccggctgaagaagcggccccccgtgcggtag

SEQ ID NO: 659 - DNA, 3954 bp, synthetic construct
  misc_feature 1..3954: note = Synthetic
  source 1..3954: mol_type = other DNA
atggaggcctcccccgcctccggcccccggcacctgatggacccccacatcttcacctccaacttcaacaacggcatcggccggcacaagacctacctgtgctacgaggtggagcggctggacaacggcacctccgtgaagatggaccagcaccggggcttcctgcacaaccaggccaagaacctgctgtgcggcttctacggccggcacgccgagctgcggttcctggacctggtgccctccctgcagctggaccccgcccagatctaccgggtgacctggttcatctcctggtccccctgcttctcctggggctgcgccggcgaggtgcgggccttcctgcaggagaacacccacgtgcggctgcggatcttcgccgcccggatctacgactacgaccccctgtacaaggaggccctgcagatgctgcgggacgccggcgcccaggtgtccatcatgacctacgacgagttcaagcactgctgggacaccttcgtggaccaccagggctgccccttccagccctgggacggcctggacgagcactcccaggccctgtccggccggctgcgggccatcctgcagaaccagggcaactccggctccgagacccccggcacctccgagtccgccacccccgagtccgcagcgttcaaaccaaatcccatcaactacatcctgggcctggccatcggcatcgcctccgtgggctgggccatggtggagatcgacgaggaggagaaccccatccggctgatcgacctgggcgtgcgggtgttcgagcgggccgaggtgcccaagaccggcgactccctggccatggcccggcggctggcccggtccgtgcggcggctgacccggcggcgggcccaccggctgctgcgggcccggcggctgctgaagcgggagggcgtgctgcaggccgccgacttcgacgagaacggcctgatcaagtccctgcccaacaccccctggcagctgcgggccgccgccctggaccggaagctgacccccctggagtggtccgccgtgctgctgcacctgatcaagcaccggggctacctgtcccagcggaagaacgagggcgagaccgccgacaaggagctgggcgccctgctgaagggcgtggccaacaacgcccacgccctgcagaccggcgacttccggacccccgccgagctggccctgaacaagttcgagaaggagtccggccacatccggaaccagcggggcgactactcccacaccttctcccggaaggacctgcaggccgagctgatcctgctgttcgagaagcagaaggagttcggcaacccccacgtgtccggcggcctgaaggagggcatcgagaccctgctgatgacccagcggcccgccctgtccggcgacgccgtgcagaagatgctgggccactgcaccttcgagcccgccgagcccaaggccgccaagaacacctacaccgccgagcggttcatctggctgaccaagctgaacaacctgcggatcctggagcagggctccgagcggcccctgaccgacaccgagcgggccaccctgatggacgagccctaccggaagtccaagctgacctacgcccaggcccggaagctgctgggcctggaggacaccgccttcttcaagggcctgcggtacggcaaggacaacgccgaggcctccaccctgatggagatgaaggcctaccacgccatctcccgggccctggagaaggagggcctgaaggacaagaagtcccccctgaacctgtcctccgagctgcaggacgagatcggcaccgccttctccctgttcaagaccgacgaggacatcaccggccggctgaaggaccgggtgcagcccgagatcctggaggccctgctgaagcacatctccttcgacaagttcgtgcagatctccctgaaggccctgcggcggatcgtgcccctgatggagcagggcaagcggtacgacgaggcctgcgccgagatctacggcgaccactacggcaagaagaacaccgaggagaagatctacctgccccccatccccgccgacgagatccggaaccccgtggtgctgcgggccctgtcccaggcccggaaggtgatcaacggcgtggtgcggcggtacggctcccccgcccggatccacatcgagaccgcccgggaggtgggcaagtccttcaaggaccggaaggagatcgagaagcggcaggaggagaaccggaaggaccgggagaaggccgccgccaagttccgggagtacttccccaacttcgtgggcgagcccaagtccaaggacatcctgaagctgcggctgtacgagcagcagcacggcaagtgcctgtactccggcaaggagatcaacctggtgcggctgaacgagaagggctacgtggagatcgaccacgccctgcccttctcccggacctgggacgactccttcaacaacaaggtgctggtgctgggctccgagaaccagaacaagggcaaccagaccccctacgagtacttcaacggcaaggacaactcccgggagtggcaggagttcaaggcccgggtggagacctcccggttcccccggtccaagaagcagcggatcctgctgcagaagttcgacgaggacggcttcaaggagtgcaacctgaacgacacccggtacgtgaaccgcttcctgtgccagttcgtggccgaccacatcctgctgaccggcaagggcaagcggcgggtgttcgcctccaacggccagatcaccaacctgctgcggggcttctggggcctgcggaaggtgcgggccgagaacgaccggcaccacgccctggacgccgtggtggtggcctgctccaccgtggccatgcagcagaagatcacccggttcgtgcggtacaaggagatgaacgccttcgacggcaagaccatcgacaaggagaccggcaaggtgctgcaccagaagacccacttcccccagccctgggagttcttcgcccaggaggtgatgatccgggtgttcggcaagcccgacggcaagcccgagttcgaggaggccgacacccccgagaagctgcggaccctgctggccgagaagctgtcctcccggcccgaggccgtgcacgagtacgtgacccccctgttcgtgtcccgggcccccaaccggaagatgtccggcgcccacaaggacaccctgcggtccgccaagcggttcgtgaagcacaacgagaagatctccgtgaagcgggtgtggctgaccgagatcaagctggccgacctggagaacatggtgaactacaagaacggccgggagatcgagctgtacgaggccctgaaggcccggctggaggcctacggcggcaacgccaagcaggccttcgaccccaaggacaaccccttctacaagaagggcggccagctggtgaaggccgtgcgggtggagaagacccaggagtccggcgtgctgctgaacaagaagaacgcctacaccatcgccgacaacggcgacatggtgcgggtggacgtgttctgcaaggtggacaagaagggcaagaaccagtacttcatcgtgcccatctacgcctggcaggtggccgagaacatcctgcccgacatcgactgcaagggctaccggatcgacgactcctacaccttctgcttctccctgcacaagtacgacctgatcgccttccagaaggacgagaagtccaaggtggagttcgcctactacatcaactgcgactcctccaacggccggttctacctggcctggcacgacaagggctccaaggagcagcagttccggatctccacccagaacctggtgctgatccagaagtaccaggtgaacgagctgggcaaggagatccggccctgccggctgaagaagcggccccccgtgcggtccggaaagcggaccgccgacggctccgagttcgagtcccccaagaagaagcggaaggtggagtag

SEQ ID NO: 660 - DNA, 3615 bp, synthetic construct
  misc_feature 1..3615: note = Synthetic
  source 1..3615: mol_type = other DNA
atgaagctgggctccatcgagttcatcaaggtgaacaagggctccggctccggctccggcgcccccgagtccgccaccgagtccggcggcacctccaccgagtccgagggctccgccggcacctccaccgagtccgagggctccgccggctccgccggctccacctccaccgaggagggcacctccaccgagtccgagggctccgccggcacctccaccgagtccgagggctccgccggcacctccgagtccgccaccgagtccggcggcacctccaccgagtccgagggctcctcctccaccggtgccgccttcaagcccaaccccatcaactacatcctgggcctggacatcggcatcgcctccgtgggctgggccatggtggagatcgacgaggaggagaaccccatccggctgatcgacctgggcgtgcgggtgttcgagcgggccgaggtgcccaagaccggcgactccctggccatggcccggcggctggcccggtccgtgcggcggctgacccggcggcgggcccaccggctgctgcgggcccggcggctgctgaagcgggagggcgtgctgcaggccgccgacttcgacgagaacggcctgatcaagtccctgcccaacaccccctggcagctgcgggccgccgccctggaccggaagctgacccccctggagtggtccgccgtgctgctgcacctgatcaagcaccggggctacctgtcccagcggaagaacgagggcgagaccgccgacaaggagctgggcgccctgctgaagggcgtggccaacaacgcccacgccctgcagaccggcgacttccggacccccgccgagctggccctgaacaagttcgagaaggagtccggccacatccggaaccagcggggcgactactcccacaccttctcccggaaggacctgcaggccgagctgatcctgctgttcgagaagcagaaggagttcggcaacccccacgtgtccggcggcctgaaggagggcatcgagaccctgctgatgacccagcggcccgccctgtccggcgacgccgtgcagaagatgctgggccactgcaccttcgagcccgccgagcccaaggccgccaagaacacctacaccgccgagcggttcatctggctgaccaagctgaacaacctgcggatcctggagcagggctccgagcggcccctgaccgacaccgagcgggccaccctgatggacgagccctaccggaagtccaagctgacctacgcccaggcccggaagctgctgggcctggaggacaccgccttcttcaagggcctgcggtacggcaaggacaacgccgaggcctccaccctgatggagatgaaggcctaccacgccatctcccgggccctggagaaggagggcctgaaggacaagaagtcccccctgaacctgtcctccgagctgcaggacgagatcggcaccgccttctccctgttcaagaccgacgaggacatcaccggccggctgaaggaccgggtgcagcccgagatcctggaggccctgctgaagcacatctccttcgacaagttcgtgcagatctccctgaaggccctgcggcggatcgtgcccctgatggagcagggcaagcggtacgacgaggcctgcgccgagatctacggcgaccactacggcaagaagaacaccgaggagaagatctacctgccccccatccccgccgacgagatccggaaccccgtggtgctgcgggccctgtcccaggcccggaaggtgatcaacggcgtggtgcggcggtacggctcccccgcccggatccacatcgagaccgcccgggaggtgggcaagtccttcaaggaccggaaggagatcgagaagcggcaggaggagaaccggaaggaccgggagaaggccgccgccaagttccgggagtacttccccaacttcgtgggcgagcccaagtccaaggacatcctgaagctgcggctgtacgagcagcagcacggcaagtgcctgtactccggcaaggagatcaacctggtgcggctgaacgagaagggctacgtggagatcgaccacgccctgcccttctcccggacctgggacgactccttcaacaacaaggtgctggtgctgggctccgagaaccagaacaagggcaaccagaccccctacgagtacttcaacggcaaggacaactcccgggagtggcaggagttcaaggcccgggtggagacctcccggttcccccggtccaagaagcagcggatcctgctgcagaagttcgacgaggacggcttcaaggagtgcaacctgaacgacacccggtacgtgaaccgcttcctgtgccagttcgtggccgaccacatcctgctgaccggcaagggcaagcggcgggtgttcgcctccaacggccagatcaccaacctgctgcggggcttctggggcctgcggaaggtgcgggccgagaacgaccggcaccacgccctggacgccgtggtggtggcctgctccaccgtggccatgcagcagaagatcacccggttcgtgcggtacaaggagatgaacgccttcgacggcaagaccatcgacaaggagaccggcaaggtgctgcaccagaagacccacttcccccagccctgggagttcttcgcccaggaggtgatgatccgggtgttcggcaagcccgacggcaagcccgagttcgaggaggccgacacccccgagaagctgcggaccctgctggccgagaagctgtcctcccggcccgaggccgtgcacgagtacgtgacccccctgttcgtgtcccgggcccccaaccggaagatgtccggcgcccacaaggacaccctgcggtccgccaagcggttcgtgaagcacaacgagaagatctccgtgaagcgggtgtggctgaccgagatcaagctggccgacctggagaacatggtgaactacaagaacggccgggagatcgagctgtacgaggccctgaaggcccggctggaggcctacggcggcaacgccaagcaggccttcgaccccaaggacaaccccttctacaagaagggcggccagctggtgaaggccgtgcgggtggagaagacccaggagtccggcgtgctgctgaacaagaagaacgcctacaccatcgccgacaacggcgacatggtgcgggtggacgtgttctgcaaggtggacaagaagggcaagaaccagtacttcatcgtgcccatctacgcctggcaggtggccgagaacatcctgcccgacatcgactgcaagggctaccggatcgacgactcctacaccttctgcttctccctgcacaagtacgacctgatcgccttccagaaggacgagaagtccaaggtggagttcgcctactacatcaactgcgactcctccaacggccggttctacctggcctggcacgacaagggctccaaggagcagcagttccggatctccacccagaacctggtgctgatccagaagtaccaggtgaacgagctgggcaaggagatccggccctgccggctgaagaagcggccccccgtgcggtccggaaagcggaccgccgacggctccgagttcgagtcccccaagaagaagcggaaggtggagtga

SEQ ID NO: 661 - DNA, 4140 bp, Streptococcus pyogenes
  source 1..4140: mol_type = genomic DNA
atggacaagaagtacagcatcggactggacatcggaacaaacagcgtcggatgggcagtcatcacagacgaatacaaggtcccgagcaagaagttcaaggtcctgggaaacacagacagacacagcatcaagaagaacctgatcggagcactgctgttcgacagcggagaaacagcagaagcaacaagactgaagagaacagcaagaagaagatacacaagaagaaagaacagaatctgctacctgcaggaaatcttcagcaacgaaatggcaaaggtcgacgacagcttcttccacagactggaagaaagcttcctggtcgaagaagacaagaagcacgaaagacacccgatcttcggaaacatcgtcgacgaagtcgcataccacgaaaagtacccgacaatctaccacctgagaaagaagctggtcgacagcacagacaaggcagacctgagactgatctacctggcactggcacacatgatcaagttcagaggacacttcctgatcgaaggagacctgaacccggacaacagcgacgtcgacaagctgttcatccagctggtccagacatacaaccagctgttcgaagaaaacccgatcaacgcaagcggagtcgacgcaaaggcaatcctgagcgcaagactgagcaagagcagaagactggaaaacctgatcgcacagctgccgggagaaaagaagaacggactgttcggaaacctgatcgcactgagcctgggactgacaccgaacttcaagagcaacttcgacctggcagaagacgcaaagctgcagctgagcaaggacacatacgacgacgacctggacaacctgctggcacagatcggagaccagtacgcagacctgttcctggcagcaaagaacctgagcgacgcaatcctgctgagcgacatcctgagagtcaacacagaaatcacaaaggcaccgctgagcgcaagcatgatcaagagatacgacgaacaccaccaggacctgacactgctgaaggcactggtcagacagcagctgccggaaaagtacaaggaaatcttcttcgaccagagcaagaacggatacgcaggatacatcgacggaggagcaagccaggaagaattctacaagttcatcaagccgatcctggaaaagatggacggaacagaagaactgctggtcaagctgaacagagaagacctgctgagaaagcagagaacattcgacaacggaagcatcccgcaccagatccacctgggagaactgcacgcaatcctgagaagacaggaagacttctacccgttcctgaaggacaacagagaaaagatcgaaaagatcctgacattcagaatcccgtactacgtcggaccgctggcaagaggaaacagcagattcgcatggatgacaagaaagagcgaagaaacaatcacaccgtggaacttcgaagaagtcgtcgacaagggagcaagcgcacagagcttcatcgaaagaatgacaaacttcgacaagaacctgccgaacgaaaaggtcctgccgaagcacagcctgctgtacgaatacttcacagtctacaacgaactgacaaaggtcaagtacgtcacagaaggaatgagaaagccggcattcctgagcggagaacagaagaaggcaatcgtcgacctgctgttcaagacaaacagaaaggtcacagtcaagcagctgaaggaagactacttcaagaagatcgaatgcttcgacagcgtcgaaatcagcggagtcgaagacagattcaacgcaagcctgggaacataccacgacctgctgaagatcatcaaggacaaggacttcctggacaacgaagaaaacgaagacatcctggaagacatcgtcctgacactgacactgttcgaagacagagaaatgatcgaagaaagactgaagacatacgcacacctgttcgacgacaaggtcatgaagcagctgaagagaagaagatacacaggatggggaagactgagcagaaagctgatcaacggaatcagagacaagcagagcggaaagacaatcctggacttcctgaagagcgacggattcgcaaacagaaacttcatgcagctgatccacgacgacagcctgacattcaaggaagacatccagaaggcacaggtcagcggacagggagacagcctgcacgaacacatcgcaaacctggcaggaagcccggcaatcaagaagggaatcctgcagacagtcaaggtcgtcgacgaactggtcaaggtcatgggaagacacaagccggaaaacatcgtcatcgaaatggcaagagaaaaccagacaacacagaagggacagaagaacagcagagaaagaatgaagagaatcgaagaaggaatcaaggaactgggaagccagatcctgaaggaacacccggtcgaaaacacacagctgcagaacgaaaagctgtacctgtactacctgcagaacggaagagacatgtacgtcgaccaggaactggacatcaacagactgagcgactacgacgtcgaccacatcgtcccgcagagcttcctgaaggacgacagcatcgacaacaaggtcctgacaagaagcgacaagaacagaggaaagagcgacaacgtcccgagcgaagaagtcgtcaagaagatgaagaactactggagacagctgctgaacgcaaagctgatcacacagagaaagttcgacaacctgacaaaggcagagagaggaggactgagcgaactggacaaggcaggattcatcaagagacagctggtcgaaacaagacagatcacaaagcacgtcgcacagatcctggacagcagaatgaacacaaagtacgacgaaaacgacaagctgatcagagaagtcaaggtcatcacactgaagagcaagctggtcagcgacttcagaaaggacttccagttctacaaggtcagagaaatcaacaactaccaccacgcacacgacgcatacctgaacgcagtcgtcggaacagcactgatcaagaagtacccgaagctggaaagcgaattcgtctacggagactacaaggtctacgacgtcagaaagatgatcgcaaagagcgaacaggaaatcggaaaggcaacagcaaagtacttcttctacagcaacatcatgaacttcttcaagacagaaatcacactggcaaacggagaaatcagaaagagaccgctgatcgaaacaaacggagaaacaggagaaatcgtctgggacaagggaagagacttcgcaacagtcagaaaggtcctgagcatgccgcaggtcaacatcgtcaagaagacagaagtccagacaggaggattcagcaaggaaagcatcctgccgaagagaaacagcgacaagctgatcgcaagaaagaaggactgggacccgaagaagtacggaggattcgacagcccgacagtcgcatacagcgtcctggtcgtcgcaaaggtcgaaaagggaaagagcaagaagctgaagagcgtcaaggaactgctgggaatcacaatcatggaaagaagcagcttcgaaaagaacccgatcgacttcctggaagcaaagggatacaaggaagtcaagaaggacctgatcatcaagctgccgaagtacagcctgttcgaactggaaaacggaagaaagagaatgctggcaagcgcaggagaactgcagaagggaaacgaactggcactgccgagcaagtacgtcaacttcctgtacctggcaagccactacgaaaagctgaagggaagcccggaagacaacgaacagaagcagctgttcgtcgaacagcacaagcactacctggacgaaatcatcgaacagatcagcgaattcagcaagagagtcatcctggcagacgcaaacctggacaaggtcctgagcgcatacaacaagcacagagacaagccgatcagagaacaggcagaaaacatcatccacctgttcacactgacaaacctgggagcaccggcagcattcaagtacttcgacacaacaatcgacagaaagagatacacaagcacaaaggaagtcctggacgcaacactgatccaccagagcatcacaggactgtacgaaacaagaatcgacctgagccagctgggaggagacggaggaggaagcccgaagaagaagagaaaggtctag

SEQ ID NO: 662 - DNA, 4140 bp, Streptococcus pyogenes
  source 1..4140: mol_type = genomic DNA
atggacaagaagtactccatcggcctggacatcggcaccaactccgtgggctgggccgtgatcaccgacgagtacaaggtgccctccaagaagttcaaggtgctgggcaacaccgaccggcactccatcaagaagaacctgatcggcgccctgctgttcgactccggcgagaccgccgaggccacccggctgaagcggaccgcccggcggcggtacacccggcggaagaaccggatctgctacctgcaggagatcttctccaacgagatggccaaggtggacgactccttcttccaccggctggaggagtccttcctggtggaggaggacaagaagcacgagcggcaccccatcttcggcaacatcgtggacgaggtggcctaccacgagaagtaccccaccatctaccacctgcggaagaagctggtggactccaccgacaaggccgacctgcggctgatctacctggccctggcccacatgatcaagttccggggccacttcctgatcgagggcgacctgaaccccgacaactccgacgtggacaagctgttcatccagctggtgcagacctacaaccagctgttcgaggagaaccccatcaacgcctccggcgtggacgccaaggccatcctgtccgcccggctgtccaagtcccggcggctggagaacctgatcgcccagctgcccggcgagaagaagaacggcctgttcggcaacctgatcgccctgtccctgggcctgacccccaacttcaagtccaacttcgacctggccgaggacgccaagctgcagctgtccaaggacacctacgacgacgacctggacaacctgctggcccagatcggcgaccagtacgccgacctgttcctggccgccaagaacctgtccgacgccatcctgctgtccgacatcctgcgggtgaacaccgagatcaccaaggcccccctgtccgcctccatgatcaagcggtacgacgagcaccaccaggacctgaccctgctgaaggccctggtgcggcagcagctgcccgagaagtacaaggagatcttcttcgaccagtccaagaacggctacgccggctacatcgacggcggcgcctcccaggaggagttctacaagttcatcaagcccatcctggagaagatggacggcaccgaggagctgctggtgaagctgaaccgggaggacctgctgcggaagcagcggaccttcgacaacggctccatcccccaccagatccacctgggcgagctgcacgccatcctgcggcggcaggaggacttctaccccttcctgaaggacaaccgggagaagatcgagaagatcctgaccttccggatcccctactacgtgggccccctggcccggggcaactcccggttcgcctggatgacccggaagtccgaggagaccatcaccccctggaacttcgaggaggtggtggacaagggcgcctccgcccagtccttcatcgagcggatgaccaacttcgacaagaacctgcccaacgagaaggtgctgcccaagcactccctgctgtacgagtacttcaccgtgtacaacgagctgaccaaggtgaagtacgtgaccgagggcatgcggaagcccgccttcctgtccggcgagcagaagaaggccatcgtggacctgctgttcaagaccaaccggaaggtgaccgtgaagcagctgaaggaggactacttcaagaagatcgagtgcttcgactccgtggagatctccggcgtggaggaccggttcaacgcctccctgggcacctaccacgacctgctgaagatcatcaaggacaaggacttcctggacaacgaggagaacgaggacatcctggaggacatcgtgctgaccctgaccctgttcgaggaccgggagatgatcgaggagcggctgaagacctacgcccacctgttcgacgacaaggtgatgaagcagctgaagcggcggcggtacaccggctggggccggctgtcccggaagctgatcaacggcatccgggacaagcagtccggcaagaccatcctggacttcctgaagtccgacggcttcgccaaccggaacttcatgcagctgatccacgacgactccctgaccttcaaggaggacatccagaaggcccaggtgtccggccagggcgactccctgcacgagcacatcgccaacctggccggctcccccgccatcaagaagggcatcctgcagaccgtgaaggtggtggacgagctggtgaaggtgatgggccggcacaagcccgagaacatcgtgatcgagatggcccgggagaaccagaccacccagaagggccagaagaactcccgggagcggatgaagcggatcgaggagggcatcaaggagctgggctcccagatcctgaaggagcaccccgtggagaacacccagctgcagaacgagaagctgtacctgtactacctgcagaacggccgggacatgtacgtggaccaggagctggacatcaaccggctgtccgactacgacgtggaccacatcgtgccccagtccttcctgaaggacgactccatcgacaacaaggtgctgacccggtccgacaagaaccggggcaagtccgacaacgtgccctccgaggaggtggtgaagaagatgaagaactactggcggcagctgctgaacgccaagctgatcacccagcggaagttcgacaacctgaccaaggccgagcggggcggcctgtccgagctggacaaggccggcttcatcaagcggcagctggtggagacccggcagatcaccaagcacgtggcccagatcctggactcccggatgaacaccaagtacgacgagaacgacaagctgatccgggaggtgaaggtgatcaccctgaagtccaagctggtgtccgacttccggaaggacttccagttctacaaggtgcgggagatcaacaactaccaccacgcccacgacgcctacctgaacgccgtggtgggcaccgccctgatcaagaagtaccccaagctggagtccgagttcgtgtacggcgactacaaggtgtacgacgtgcggaagatgatcgccaagtccgagcaggagatcggcaaggccaccgccaagtacttcttctactccaacatcatgaacttcttcaagaccgagatcaccctggccaacggcgagatccggaagcggcccctgatcgagaccaacggcgagaccggcgagatcgtgtgggacaagggccgggacttcgccaccgtgcggaaggtgctgtccatgccccaggtgaacatcgtgaagaagaccgaggtgcagaccggcggcttctccaaggagtccatcctgcccaagcggaactccgacaagctgatcgcccggaagaaggactgggaccccaagaagtacggcggcttcgactcccccaccgtggcctactccgtgctggtggtggccaaggtggagaagggcaagtccaagaagctgaagtccgtgaaggagctgctgggcatcaccatcatggagcggtcctccttcgagaagaaccccatcgacttcctggaggccaagggctacaaggaggtgaagaaggacctgatcatcaagctgcccaagtactccctgttcgagctggagaacggccggaagcggatgctggcctccgccggcgagctgcagaagggcaacgagctggccctgccctccaagtacgtgaacttcctgtacctggcctcccactacgagaagctgaagggctcccccgaggacaacgagcagaagcagctgttcgtggagcagcacaagcactacctggacgagatcatcgagcagatctccgagttctccaagcgggtgatcctggccgacgccaacctggacaaggtgctgtccgcctacaacaagcaccgggacaagcccatccgggagcaggccgagaacatcatccacctgttcaccctgaccaacctgggcgcccccgccgccttcaagtacttcgacaccaccatcgaccggaagcggtacacctccaccaaggaggtgctggacgccaccctgatccaccagtccatcaccggcctgtacgagacccggatcgacctgtcccagctgggcggcgacggcggcggctcccccaagaagaagcggaaggtgtga

SEQ ID NO: 663 - RNA, 4140 nt, synthetic construct
  misc_feature 1..4140: note = Synthetic
  source 1..4140: mol_type = other RNA
atggacaagaagtacagcatcggcctggacatcggcacgaacagcgttggctgggctgtgatcacggacgagtacaaggttccctcaaagaagttcaaggtgctgggcaacacggaccggcacagcatcaagaagaatctcatcggtgcactgctgttcgacagcggtgagacggccgaagccacgcggctgaagcggacggcccgccggcggtacacgcggcggaagaaccggatctgctacctgcaggagatcttcagcaacgagatggccaaggtggacgacagcttcttccaccggctggaggagagcttcctggtggaggaggacaagaagcacgagcggcaccccatcttcggcaacatcgtggacgaagtcgcctaccacgagaagtaccccaccatctaccacctgcggaagaagctggtggactcgactgacaaggccgacctgcggctgatctacctggcactggcccacatgataaagttccggggccacttcctgatcgagggcgacctgaaccctgacaacagcgacgtggacaagctgttcatccagctggtgcagacctacaaccagctgttcgaggagaaccccatcaacgccagcggcgtggacgccaaggccatcctcagcgcccgcctcagcaagagccggcggctggagaatctcatcgcccagcttccaggtgagaagaagaatgggctgttcggcaatctcatcgcactcagcctgggcctgactcccaacttcaagagcaacttcgacctggccgaggacgccaagctgcagctcagcaaggacacctacgacgacgacctggacaatctcctggcccagatcggcgaccagtacgccgacctgttcctggctgccaagaatctcagcgacgccatcctgctcagcgacatcctgcgggtgaacacagagatcacgaaggcccccctcagcgccagcatgataaagcggtacgacgagcaccaccaggacctgacgctgctgaaggcactggtgcggcagcagcttccagagaagtacaaggagatcttcttcgaccagagcaagaatgggtacgccgggtacatcgacggtggtgccagccaggaggagttctacaagttcatcaagcccatcctggagaagatggacggcacagaggagctgctggtgaagctgaacagggaggacctgctgcggaagcagcggacgttcgacaatgggagcatcccccaccagatccacctgggtgagctgcacgccatcctgcggcggcaggaggacttctaccccttcctgaaggacaacagggagaagatcgagaagatcctgacgttccggatcccctactacgttggccccctggcccgcggcaacagccggttcgcctggatgacgcggaagagcgaggagacgatcactccctggaacttcgaggaagtcgtggacaagggtgccagcgcccagagcttcatcgagcggatgacgaacttcgacaagaatcttccaaacgagaaggtgcttccaaagcacagcctgctgtacgagtacttcacggtgtacaacgagctgacgaaggtgaagtacgtgacagagggcatgcggaagcccgccttcctcagcggtgagcagaagaaggccatcgtggacctgctgttcaagacgaaccggaaggtgacggtgaagcagctgaaggaggactacttcaagaagatcgagtgcttcgacagcgtggagatcagcggcgtggaggaccggttcaacgccagcctgggcacctaccacgacctgctgaagatcatcaaggacaaggacttcctggacaacgaggagaacgaggacatcctggaggacatcgtgctgacgctgacgctgttcgaggacagggagatgatagaggagcggctgaagacctacgcccacctgttcgacgacaaggtgatgaagcagctgaagcggcggcggtacacgggctggggccggctcagccggaagctgatcaatgggatccgagacaagcagagcggcaagacgatcctggacttcctgaagagcgacggcttcgccaaccggaacttcatgcagctgatccacgacgacagcctgacgttcaaggaggacatccagaaggcccaggtcagcggccagggcgacagcctgcacgagcacatcgccaatctcgccgggagccccgccatcaagaaggggatcctgcagacggtgaaggtggtggacgagctggtgaaggtgatgggccggcacaagccagagaacatcgtgatcgagatggccagggagaaccagacgactcaaaaggggcagaagaacagcagggagcggatgaagcggatcgaggagggcatcaaggagctgggcagccagatcctgaaggagcaccccgtggagaacactcaactgcagaacgagaagctgtacctgtactacctgcagaatgggcgagacatgtacgtggaccaggagctggacatcaaccggctcagcgactacgacgtggaccacatcgttccccagagcttcctgaaggacgacagcatcgacaacaaggtgctgacgcggagcgacaagaaccggggcaagagcgacaacgttccctcagaggaagtcgtgaagaagatgaagaactactggcggcagctgctgaacgccaagctgatcactcaacggaagttcgacaatctcacgaaggccgagcggggtggcctcagcgagctggacaaggccgggttcatcaagcggcagctggtggagacgcggcagatcacgaagcacgtggcccagatcctggacagccggatgaacacgaagtacgacgagaacgacaagctgatcagggaagtcaaggtgatcacgctgaagagcaagctggtcagcgacttccggaaggacttccagttctacaaggtgagggagatcaacaactaccaccacgcccacgacgcctacctgaacgctgtggttggcacggcactgatcaagaagtaccccaagctggagagcgagttcgtgtacggcgactacaaggtgtacgacgtgcggaagatgatagccaagagcgagcaggagatcggcaaggccacggccaagtacttcttctacagcaacatcatgaacttcttcaagacagagatcacgctggccaatggtgagatccggaagcggcccctgatcgagacgaatggtgagacgggtgagatcgtgtgggacaaggggcgagacttcgccacggtgcggaaggtgctcagcatgccccaggtgaacatcgtgaagaagacagaagtccagacgggtggcttcagcaaggagagcatccttccaaagcggaacagcgacaagctgatcgcccgcaagaaggactgggaccccaagaagtacggtggcttcgacagccccaccgtggcctacagcgtgctggtggtggccaaggtggagaaggggaagagcaagaagctgaagagcgtgaaggagctgctgggcatcacgatcatggagcggagcagcttcgagaagaaccccatcgacttcctggaagccaaggggtacaaggaagtcaagaaggacctgatcatcaagcttccaaagtacagcctgttcgagctggagaatgggcggaagcggatgctggccagcgccggtgagctgcagaaggggaacgagctggcacttccctcaaagtacgtgaacttcctgtacctggccagccactacgagaagctgaaggggagcccagaggacaacgagcagaagcagctgttcgtggagcagcacaagcactacctggacgagatcatcgagcagatcagcgagttcagcaagcgggtgatcctggccgacgccaatctcgacaaggtgctcagcgcctacaacaagcaccgagacaagcccatcagggagcaggccgagaacatcatccacctgttcacgctgacgaatctcggtgcccccgctgccttcaagtacttcgacacgacgatcgaccggaagcggtacacgtcgactaaggaagtcctggacgccacgctgatccaccagagcatcacgggcctgtacgagacgcggatcgacctcagccagctgggtggcgacggtggtggcagccccaagaagaagcggaaggtgtag

SEQ ID NO: 664 - RNA, 4140 nt, synthetic construct
  misc_feature 1..4140: note = Synthetic
  source 1..4140: mol_type = other RNA
atggacaagaagtacagcatcggcctcgacatcggcaccaacagcgtcggctgggccgtcatcaccgacgagtacaaggtccccagcaagaagttcaaggtcctcggcaacaccgaccgccacagcatcaagaagaacctcatcggcgccctcctcttcgacagcggcgagaccgccgaggccacccgcctcaagcgcaccgcccgccgccgctacacccgccgcaagaaccgcatctgctacctccaggagatcttcagcaacgagatggccaaggtcgacgacagcttcttccaccgcctcgaggagagcttcctcgtcgaggaggacaagaagcacgagcgccaccccatcttcggcaacatcgtcgacgaggtcgcctaccacgagaagtaccccaccatctaccacctccgcaagaagctcgtcgacagcaccgacaaggccgacctccgcctcatctacctcgccctcgcccacatgatcaagttccgcggccacttcctcatcgagggcgacctcaaccccgacaacagcgacgtcgacaagctcttcatccagctcgtccagacctacaaccagctcttcgaggagaaccccatcaacgccagcggcgtcgacgccaaggccatcctcagcgcccgcctcagcaagagccgccgcctcgagaacctcatcgcccagctccccggcgagaagaagaacggcctcttcggcaacctcatcgccctcagcctcggcctcacccccaacttcaagagcaacttcgacctcgccgaggacgccaagctccagctcagcaaggacacctacgacgacgacctcgacaacctcctcgcccagatcggcgaccagtacgccgacctcttcctcgccgccaagaacctcagcgacgccatcctcctcagcgacatcctccgcgtcaacaccgagatcaccaaggcccccctcagcgccagcatgatcaagcgctacgacgagcaccaccaggacctcaccctcctcaaggccctcgtccgccagcagctccccgagaagtacaaggagatcttcttcgaccagagcaagaacggctacgccggctacatcgacggcggcgccagccaggaggagttctacaagttcatcaagcccatcctcgagaagatggacggcaccgaggagctcctcgtcaagctcaaccgcgaggacctcctccgcaagcagcgcaccttcgacaacggcagcatcccccaccagatccacctcggcgagctccacgccatcctccgccgccaggaggacttctaccccttcctcaaggacaaccgcgagaagatcgagaagatcctcaccttccgcatcccctactacgtcggccccctcgcccgcggcaacagccgcttcgcctggatgacccgcaagagcgaggagaccatcaccccctggaacttcgaggaggtcgtcgacaagggcgccagcgcccagagcttcatcgagcgcatgaccaacttcgacaagaacctccccaacgagaaggtcctccccaagcacagcctcctctacgagtacttcaccgtctacaacgagctcaccaaggtcaagtacgtcaccgagggcatgcgcaagcccgccttcctcagcggcgagcagaagaaggccatcgtcgacctcctcttcaagaccaaccgcaaggtcaccgtcaagcagctcaaggaggactacttcaagaagatcgagtgcttcgacagcgtcgagatcagcggcgtcgaggaccgcttcaacgccagcctcggcacctaccacgacctcctcaagatcatcaaggacaaggacttcctcgacaacgaggagaacgaggacatcctcgaggacatcgtcctcaccctcaccctcttcgaggaccgcgagatgatcgaggagcgcctcaagacctacgcccacctcttcgacgacaaggtcatgaagcagctcaagcgccgccgctacaccggctggggccgcctcagccgcaagctcatcaacggcatccgcgacaagcagagcggcaagaccatcctcgacttcctcaagagcgacggcttcgccaaccgcaacttcatgcagctcatccacgacgacagcctcaccttcaaggaggacatccagaaggcccaggtcagcggccagggcgacagcctccacgagcacatcgccaacctcgccggcagccccgccatcaagaagggcatcctccagaccgtcaaggtcgtcgacgagctcgtcaaggtcatgggccgccacaagcccgagaacatcgtcatcgagatggcccgcgagaaccagaccacccagaagggccagaagaacagccgcgagcgcatgaagcgcatcgaggagggcatcaaggagctcggcagccagatcctcaaggagcaccccgtcgagaacacccagctccagaacgagaagctctacctctactacctccagaacggccgcgacatgtacgtcgaccaggagctcgacatcaaccgcctcagcgactacgacgtcgaccacatcgtcccccagagcttcctcaaggacgacagcatcgacaacaaggtcctcacccgcagcgacaagaaccgcggcaagagcgacaacgtccccagcgaggaggtcgtcaagaagatgaagaactactggcgccagctcctcaacgccaagctcatcacccagcgcaagttcgacaacctcaccaaggccgagcgcggcggcctcagcgagctcgacaaggccggcttcatcaagcgccagctcgtcgagacccgccagatcaccaagcacgtcgcccagatcctcgacagccgcatgaacaccaagtacgacgagaacgacaagctcatccgcgaggtcaaggtcatcaccctcaagagcaagctcgtcagcgacttccgcaaggacttccagttctacaaggtccgcgagatcaacaactaccaccacgcccacgacgcctacctcaacgccgtcgtcggcaccgccctcatcaagaagtaccccaagctcgagagcgagttcgtctacggcgactacaaggtctacgacgtccgcaagatgatcgccaagagcgagcaggagatcggcaaggccaccgccaagtacttcttctacagcaacatcatgaacttcttcaagaccgagatcaccctcgccaacggcgagatccgcaagcgccccctcatcgagaccaacggcgagaccggcgagatcgtctgggacaagggccgcgacttcgccaccgtccgcaaggtcctcagcatgccccaggtcaacatcgtcaagaagaccgaggtccagaccggcggcttcagcaaggagagcatcctccccaagcgcaacagcgacaagctcatcgcccgcaagaaggactgggaccccaagaagtacggcggcttcgacagccccaccgtcgcctacagcgtcctcgtcgtcgccaaggtcgagaagggcaagagcaagaagctcaagagcgtcaaggagctcctcggcatcaccatcatggagcgcagcagcttcgagaagaaccccatcgacttcctcgaggccaagggctacaaggaggtcaagaaggacctcatcatcaagctccccaagtacagcctcttcgagctcgagaacggccgcaagcgcatgctcgccagcgccggcgagctccagaagggcaacgagctcgccctccccagcaagtacgtcaacttcctctacctcgccagccactacgagaagctcaagggcagccccgaggacaacgagcagaagcagctcttcgtcgagcagcacaagcactacctcgacgagatcatcgagcagatcagcgagttcagcaagcgcgtcatcctcgccgacgccaacctcgacaaggtcctcagcgcctacaacaagcaccgcgacaagcccatccgcgagcaggccgagaacatcatccacctcttcaccctcaccaacctcggcgcccccgccgccttcaagtacttcgacaccaccatcgaccgcaagcgctacaccagcaccaaggaggtcctcgacgccaccctcatccaccagagcatcaccggcctctacgagacccgcatcgacctcagccagctcggcggcgacggcggcggcagccccaagaagaagcgcaaggtctag

SEQ ID NO: 665 - DNA, 4140 bp, Streptococcus pyogenes
  source 1..4140: mol_type = genomic DNA
atggacaagaagtacagcatcggcctggacatcggcaccaacagcgtgggctgggccgtgatcaccgacgagtacaaggtgcccagcaagaagttcaaggtgctgggcaacaccgaccggcacagcatcaagaagaacctgatcggcgccctgctgttcgacagcggcgagaccgccgaggccacccggctgaagcggaccgcccggcggcggtacacccggcggaagaaccggatctgctacctgcaggagatcttcagcaacgagatggccaaggtggacgacagcttcttccaccggctggaggagagcttcctggtggaggaggacaagaagcacgagcggcaccccatcttcggcaacatcgtggacgaggtggcctaccacgagaagtaccccaccatctaccacctgcggaagaagctggtggacagcaccgacaaggccgacctgcggctgatctacctggccctggcccacatgatcaagttccggggccacttcctgatcgagggcgacctgaaccccgacaacagcgacgtggacaagctgttcatccagctggtgcagacctacaaccagctgttcgaggagaaccccatcaacgccagcggcgtggacgccaaggccatcctgagcgcccggctgagcaagagccggcggctggagaacctgatcgcccagctgcccggcgagaagaagaacggcctgttcggcaacctgatcgccctgagcctgggcctgacccccaacttcaagagcaacttcgacctggccgaggacgccaagctgcagctgagcaaggacacctacgacgacgacctggacaacctgctggcccagatcggcgaccagtacgccgacctgttcctggccgccaagaacctgagcgacgccatcctgctgagcgacatcctgcgggtgaacaccgagatcaccaaggcccccctgagcgccagcatgatcaagcggtacgacgagcaccaccaggacctgaccctgctgaaggccctggtgcggcagcagctgcccgagaagtacaaggagatcttcttcgaccagagcaagaacggctacgccggctacatcgacggcggcgccagccaggaggagttctacaagttcatcaagcccatcctggagaagatggacggcaccgaggagctgctggtgaagctgaaccgggaggacctgctgcggaagcagcggaccttcgacaacggcagcatcccccaccagatccacctgggcgagctgcacgccatcctgcggcggcaggaggacttctaccccttcctgaaggacaaccgggagaagatcgagaagatcctgaccttccggatcccctactacgtgggccccctggcccggggcaacagccggttcgcctggatgacccggaagagcgaggagaccatcaccccctggaacttcgaggaggtggtggacaagggcgccagcgcccagagcttcatcgagcggatgaccaacttcgacaagaacctgcccaacgagaaggtgctgcccaagcacagcctgctgtacgagtacttcaccgtgtacaacgagctgaccaaggtgaagtacgtgaccgagggcatgcggaagcccgccttcctgagcggcgagcagaagaaggccatcgtggacctgctgttcaagaccaaccggaaggtgaccgtgaagcagctgaaggaggactacttcaagaagatcgagtgcttcgacagcgtggagatcagcggcgtggaggaccggttcaacgccagcctgggcacctaccacgacctgctgaagatcatcaaggacaaggacttcctggacaacgaggagaacgaggacatcctggaggacatcgtgctgaccctgaccctgttcgaggaccgggagatgatcgaggagcggctgaagacctacgcccacctgttcgacgacaaggtgatgaagcagctgaagcggcggcggtacaccggctggggccggctgagccggaagctgatcaacggcatccgggacaagcagagcggcaagaccatcctggacttcctgaagagcgacggcttcgccaaccggaacttcatgcagctgatccacgacgacagcctgaccttcaaggaggacatccagaaggcccaggtgagcggccagggcgacagcctgcacgagcacatcgccaacctggccggcagccccgccatcaagaagggcatcctgcagaccgtgaaggtggtggacgagctggtgaaggtgatgggccggcacaagcccgagaacatcgtgatcgagatggcccgggagaaccagaccacccagaagggccagaagaacagccgggagcggatgaagcggatcgaggagggcatcaaggagctgggcagccagatcctgaaggagcaccccgtggagaacacccagctgcagaacgagaagctgtacctgtactacctgcagaacggccgggacatgtacgtggaccaggagctggacatcaaccggctgagcgactacgacgtggaccacatcgtgccccagagcttcctgaaggacgacagcatcgacaacaaggtgctgacccggagcgacaagaaccggggcaagagcgacaacgtgcccagcgaggaggtggtgaagaagatgaagaactactggcggcagctgctgaacgccaagctgatcacccagcggaagttcgacaacctgaccaaggccgagcggggcggcctgagcgagctggacaaggccggcttcatcaagcggcagctggtggagacccggcagatcaccaagcacgtggcccagatcctggacagccggatgaacaccaagtacgacgagaacgacaagctgatccgggaggtgaaggtgatcaccctgaagagcaagctggtgagcgacttccggaaggacttccagttctacaaggtgcgggagatcaacaactaccaccacgcccacgacgcctacctgaacgccgtggtgggcaccgccctgatcaagaagtaccccaagctggagagcgagttcgtgtacggcgactacaaggtgtacgacgtgcggaagatgatcgccaagagcgagcaggagatcggcaaggccaccgccaagtacttcttctacagcaacatcatgaacttcttcaagaccgagatcaccctggccaacggcgagatccggaagcggcccctgatcgagaccaacggcgagaccggcgagatcgtgtgggacaagggccgggacttcgccaccgtgcggaaggtgctgagcatgccccaggtgaacatcgtgaagaagaccgaggtgcagaccggcggcttcagcaaggagagcatcctgcccaagcggaacagcgacaagctgatcgcccggaagaaggactgggaccccaagaagtacggcggcttcgacagccccaccgtggcctacagcgtgctggtggtggccaaggtggagaagggcaagagcaagaagctgaagagcgtgaaggagctgctgggcatcaccatcatggagcggagcagcttcgagaagaaccccatcgacttcctggaggccaagggctacaaggaggtgaagaaggacctgatcatcaagctgcccaagtacagcctgttcgagctggagaacggccggaagcggatgctggccagcgccggcgagctgcagaagggcaacgagctggccctgcccagcaagtacgtgaacttcctgtacctggccagccactacgagaagctgaagggcagccccgaggacaacgagcagaagcagctgttcgtggagcagcacaagcactacctggacgagatcatcgagcagatcagcgagttcagcaagcgggtgatcctggccgacgccaacctggacaaggtgctgagcgcctacaacaagcaccgggacaagcccatccgggagcaggccgagaacatcatccacctgttcaccctgaccaacctgggcgcccccgccgccttcaagtacttcgacaccaccatcgaccggaagcggtacaccagcaccaaggaggtgctggacgccaccctgatccaccagagcatcaccggcctgtacgagacccggatcgacctgagccagctgggcggcgacggcggcggcagccccaagaagaagcggaaggtgtga

SEQ ID NO: 666 - protein, 1379 aa, synthetic construct
  REGION 1..1379: note = Synthetic
MDKKYSIGLDIGTNSVGWAVITDEYKVPSKKFKVLGNTDRHSIKKNLIGALLFDSGETAEATRLKRTARRRYTRRKNRICYLQEIFSNEMAKVDDSFFHRLEESFLVEEDKKHERHPIFGNIVDEVAYHEKYPTIYHLRKKLVDSTDKADLRLIYLALAHMIKFRGHFLIEGDLNPDNSDVDKLFIQLVQTYNQLFEENPINASGVDAKAILSARLSKSRRLENLIAQLPGEKKNGLFGNLIALSLGLTPNFKSNFDLAEDAKLQLSKDTYDDDLDNLLAQIGDQYADLFLAAKNLSDAILLSDILRVNTEITKAPLSASMIKRYDEHHQDLTLLKALVRQQLPEKYKEIFFDQSKNGYAGYIDGGASQEEFYKFIKPILEKMDGTEELLVKLNREDLLRKQRTFDNGSIPHQIHLGELHAILRRQEDFYPFLKDNREKIEKILTFRIPYYVGPLARGNSRFAWMTRKSEETITPWNFEEVVDKGASAQSFIERMTNFDKNLPNEKVLPKHSLLYEYFTVYNELTKVKYVTEGMRKPAFLSGEQKKAIVDLLFKTNRKVTVKQLKEDYFKKIECFDSVEISGVEDRFNASLGTYHDLLKIIKDKDFLDNEENEDILEDIVLTLTLFEDREMIEERLKTYAHLFDDKVMKQLKRRRYTGWGRLSRKLINGIRDKQSGKTILDFLKSDGFANRNFMQLIHDDSLTFKEDIQKAQVSGQGDSLHEHIANLAGSPAIKKGILQTVKVVDELVKVMGRHKPENIVIEMARENQTTQKGQKNSRERMKRIEEGIKELGSQILKEHPVENTQLQNEKLYLYYLQNGRDMYVDQELDINRLSDYDVDHIVPQSFLKDDSIDNKVLTRSDKNRGKSDNVPSEEVVKKMKNYWRQLLNAKLITQRKFDNLTKAERGGLSELDKAGFIKRQLVETRQITKHVAQILDSRMNTKYDENDKLIREVKVITLKSKLVSDFRKDFQFYKVREINNYHHAHDAYLNAVVGTALIKKYPKLESEFVYGDYKVYDVRKMIAKSEQEIGKATAKYFFYSNIMNFFKTEITLANGEIRKRPLIETNGETGEIVWDKGRDFATVRKVLSMPQVNIVKKTEVQTGGFSKESILPKRNSDKLIARKKDWDPKKYGGFDSPTVAYSVLVVAKVEKGKSKKLKSVKELLGITIMERSSFEKNPIDFLEAKGYKEVKKDLIIKLPKYSLFELENGRKRMLASAGELQKGNELALPSKYVNFLYLASHYEKLKGSPEDNEQKQLFVEQHKHYLDEIIEQISEFSKRVILADANLDKVLSAYNKHRDKPIREQAENIIHLFTLTNLGAPAAFKYFDTTIDRKRYTSTKEVLDATLIHQSITGLYETRIDLSQLGGDGGGSPKKKRKV

SEQ ID NO: 667 - RNA, 4197 nt, synthetic construct
  misc_feature 1..4197: note = Synthetic
  source 1..4197: mol_type = other RNA
atggacaagaagtactccatcggcctggacatcggcaccaactccgtgggctgggccgtgatcaccgacgagtacaaggtgccctccaagaagttcaaggtgctgggcaacaccgaccggcactccatcaagaagaacctgatcggcgccctgctgttcgactccggcgagaccgccgaggccacccggctgaagcggaccgcccggcggcggtacacccggcggaagaaccggatctgctacctgcaggagatcttctccaacgagatggccaaggtggacgactccttcttccaccggctggaggagtccttcctggtggaggaggacaagaagcacgagcggcaccccatcttcggcaacatcgtggacgaggtggcctaccacgagaagtaccccaccatctaccacctgcggaagaagctggtggactccaccgacaaggccgacctgcggctgatctacctggccctggcccacatgatcaagttccggggccacttcctgatcgagggcgacctgaaccccgacaactccgacgtggacaagctgttcatccagctggtgcagacctacaaccagctgttcgaggagaaccccatcaacgcctccggcgtggacgccaaggccatcctgtccgcccggctgtccaagtcccggcggctggagaacctgatcgcccagctgcccggcgagaagaagaacggcctgttcggcaacctgatcgccctgtccctgggcctgacccccaacttcaagtccaacttcgacctggccgaggacgccaagctgcagctgtccaaggacacctacgacgacgacctggacaacctgctggcccagatcggcgaccagtacgccgacctgttcctggccgccaagaacctgtccgacgccatcctgctgtccgacatcctgcgggtgaacaccgagatcaccaaggcccccctgtccgcctccatgatcaagcggtacgacgagcaccaccaggacctgaccctgctgaaggccctggtgcggcagcagctgcccgagaagtacaaggagatcttcttcgaccagtccaagaacggctacgccggctacatcgacggcggcgcctcccaggaggagttctacaagttcatcaagcccatcctggagaagatggacggcaccgaggagctgctggtgaagctgaaccgggaggacctgctgcggaagcagcggaccttcgacaacggctccatcccccaccagatccacctgggcgagctgcacgccatcctgcggcggcaggaggacttctaccccttcctgaaggacaaccgggagaagatcgagaagatcctgaccttccggatcccctactacgtgggccccctggcccggggcaactcccggttcgcctggatgacccggaagtccgaggagaccatcaccccctggaacttcgaggaggtggtggacaagggcgcctccgcccagtccttcatcgagcggatgaccaacttcgacaagaacctgcccaacgagaaggtgctgcccaagcactccctgctgtacgagtacttcaccgtgtacaacgagctgaccaaggtgaagtacgtgaccgagggcatgcggaagcccgccttcctgtccggcgagcagaagaaggccatcgtggacctgctgttcaagaccaaccggaaggtgaccgtgaagcagctgaaggaggactacttcaagaagatcgagtgcttcgactccgtggagatctccggcgtggaggaccggttcaacgcctccctgggcacctaccacgacctgctgaagatcatcaaggacaaggacttcctggacaacgaggagaacgaggacatcctggaggacatcgtgctgaccctgaccctgttcgaggaccgggagatgatcgaggagcggctgaagacctacgcccacctgttcgacgacaaggtgatgaagcagctgaagcggcggcggtacaccggctggggccggctgtcccggaagctgatcaacggcatccgggacaagcagtccggcaagaccatcctggacttcctgaagtccgacggcttcgccaaccggaacttcatgcagctgatccacgacgactccctgaccttcaaggaggacatccagaaggcccaggtgtccggccagggcgactccctgcacgagcacatcgccaacctggccggctcccccgccatcaagaagggcatcctgcagaccgtgaaggtggtggacgagctggtgaaggtgatgggccggcacaagcccgagaacatcgtgatcgagatggcccgggagaaccagaccacccagaagggccagaagaactcccgggagcggatgaagcggatcgaggagggcatcaaggagctgggctcccagatcctgaaggagcaccccgtggagaacacccagctgcagaacgagaagctgtacctgtactacctgcagaacggccgggacatgtacgtggaccaggagctggacatcaaccggctgtccgactacgacgtggaccacatcgtgccccagtccttcctgaaggacgactccatcgacaacaaggtgctgacccggtccgacaagaaccggggcaagtccgacaacgtgccctccgaggaggtggtgaagaagatgaagaactactggcggcagctgctgaacgccaagctgatcacccagcggaagttcgacaacctgaccaaggccgagcggggcggcctgtccgagctggacaaggccggcttcatcaagcggcagctggtggagacccggcagatcaccaagcacgtggcccagatcctggactcccggatgaacaccaagtacgacgagaacgacaagctgatccgggaggtgaaggtgatcaccctgaagtccaagctggtgtccgacttccggaaggacttccagttctacaaggtgcgggagatcaacaactaccaccacgcccacgacgcctacctgaacgccgtggtgggcaccgccctgatcaagaagtaccccaagctggagtccgagttcgtgtacggcgactacaaggtgtacgacgtgcggaagatgatcgccaagtccgagcaggagatcggcaaggccaccgccaagtacttcttctactccaacatcatgaacttcttcaagaccgagatcaccctggccaacggcgagatccggaagcggcccctgatcgagaccaacggcgagaccggcgagatcgtgtgggacaagggccgggacttcgccaccgtgcggaaggtgctgtccatgccccaggtgaacatcgtgaagaagaccgaggtgcagaccggcggcttctccaaggagtccatcctgcccaagcggaactccgacaagctgatcgcccggaagaaggactgggaccccaagaagtacggcggcttcgactcccccaccgtggcctactccgtgctggtggtggccaaggtggagaagggcaagtccaagaagctgaagtccgtgaaggagctgctgggcatcaccatcatggagcggtcctccttcgagaagaaccccatcgacttcctggaggccaagggctacaaggaggtgaagaaggacctgatcatcaagctgcccaagtactccctgttcgagctggagaacggccggaagcggatgctggcctccgccggcgagctgcagaagggcaacgagctggccctgccctccaagtacgtgaacttcctgtacctggcctcccactacgagaagctgaagggctcccccgaggacaacgagcagaagcagctgttcgtggagcagcacaagcactacctggacgagatcatcgagcagatctccgagttctccaagcgggtgatcctggccgacgccaacctggacaaggtgctgtccgcctacaacaagcaccgggacaagcccatccgggagcaggccgagaacatcatccacctgttcaccctgaccaacctgggcgcccccgccgccttcaagtacttcgacaccaccatcgaccggaagcggtacacctccaccaaggaggtgctggacgccaccctgatccaccagtccatcaccggcctgtacgagacccggatcgacctgtcccagctgggcggcgacggcggcggctcccccaagaagaagcggaaggtgtccgagtccgccacccccgagtccgtgtccggctggcggctgttcaagaagatctcctga

SEQ ID NO: 668 - protein, 1398 aa, synthetic construct
  REGION 1..1398: note = Synthetic
MDKKYSIGLDIGTNSVGWAVITDEYKVPSKKFKVLGNTDRHSIKKNLIGALLFDSGETAEATRLKRTARRRYTRRKNRICYLQEIFSNEMAKVDDSFFHRLEESFLVEEDKKHERHPIFGNIVDEVAYHEKYPTIYHLRKKLVDSTDKADLRLIYLALAHMIKFRGHFLIEGDLNPDNSDVDKLFIQLVQTYNQLFEENPINASGVDAKAILSARLSKSRRLENLIAQLPGEKKNGLFGNLIALSLGLTPNFKSNFDLAEDAKLQLSKDTYDDDLDNLLAQIGDQYADLFLAAKNLSDAILLSDILRVNTEITKAPLSASMIKRYDEHHQDLTLLKALVRQQLPEKYKEIFFDQSKNGYAGYIDGGASQEEFYKFIKPILEKMDGTEELLVKLNREDLLRKQRTFDNGSIPHQIHLGELHAILRRQEDFYPFLKDNREKIEKILTFRIPYYVGPLARGNSRFAWMTRKSEETITPWNFEEVVDKGASAQSFIERMTNFDKNLPNEKVLPKHSLLYEYFTVYNELTKVKYVTEGMRKPAFLSGEQKKAIVDLLFKTNRKVTVKQLKEDYFKKIECFDSVEISGVEDRFNASLGTYHDLLKIIKDKDFLDNEENEDILEDIVLTLTLFEDREMIEERLKTYAHLFDDKVMKQLKRRRYTGWGRLSRKLINGIRDKQSGKTILDFLKSDGFANRNFMQLIHDDSLTFKEDIQKAQVSGQGDSLHEHIANLAGSPAIKKGILQTVKVVDELVKVMGRHKPENIVIEMARENQTTQKGQKNSRERMKRIEEGIKELGSQILKEHPVENTQLQNEKLYLYYLQNGRDMYVDQELDINRLSDYDVDHIVPQSFLKDDSIDNKVLTRSDKNRGKSDNVPSEEVVKKMKNYWRQLLNAKLITQRKFDNLTKAERGGLSELDKAGFIKRQLVETRQITKHVAQILDSRMNTKYDENDKLIREVKVITLKSKLVSDFRKDFQFYKVREINNYHHAHDAYLNAVVGTALIKKYPKLESEFVYGDYKVYDVRKMIAKSEQEIGKATAKYFFYSNIMNFFKTEITLANGEIRKRPLIETNGETGEIVWDKGRDFATVRKVLSMPQVNIVKKTEVQTGGFSKESILPKRNSDKLIARKKDWDPKKYGGFDSPTVAYSVLVVAKVEKGKSKKLKSVKELLGITIMERSSFEKNPIDFLEAKGYKEVKKDLIIKLPKYSLFELENGRKRMLASAGELQKGNELALPSKYVNFLYLASHYEKLKGSPEDNEQKQLFVEQHKHYLDEIIEQISEFSKRVILADANLDKVLSAYNKHRDKPIREQAENIIHLFTLTNLGAPAAFKYFDTTIDRKRYTSTKEVLDATLIHQSITGLYETRIDLSQLGGDGGGSPKKKRKVSESATPESVSGWRLFKKIS

SEQ ID NO: 669 - protein, 7 aa, synthetic construct
  REGION 1..7: note = Synthetic
PKKKRKV

SEQ ID NO: 670 - protein, 7 aa, synthetic construct
  REGION 1..7: note = Synthetic
PKKKRRV

SEQ ID NO: 671 - protein, 9 aa, synthetic construct
  REGION 1..9: note = Synthetic
LAAKRSRTT

SEQ ID NO: 672 - protein, 9 aa, synthetic construct
  REGION 1..9: note = Synthetic
QAAKRSRTT

SEQ ID NO: 673 - protein, 10 aa, synthetic construct
  REGION 1..10: note = Synthetic
PAPAKRERTT

SEQ ID NO: 674 - protein, 9 aa, synthetic construct
  REGION 1..9: note = Synthetic
QAAKRPRTT

SEQ ID NO: 675 - protein, 9 aa, synthetic construct
  REGION 1..9: note = Synthetic
RAAKRPRTT

SEQ ID NO: 676 - protein, 11 aa, synthetic construct
  REGION 1..11: note = Synthetic
AAAKRSWSMAA

SEQ ID NO: 677 - protein, 11 aa, synthetic construct
  REGION 1..11: note = Synthetic
AAAKRVWSMAF

SEQ ID NO: 678 - protein, 11 aa, synthetic construct
  REGION 1..11: note = Synthetic
AAAKRSWSMAF

SEQ ID NO: 679 - protein, 10 aa, synthetic construct
  REGION 1..10: note = Synthetic
AAAKRKYFAA

SEQ ID NO: 680 - protein, 10 aa, synthetic construct
  REGION 1..10: note = Synthetic
RAAKRKAFAA

SEQ ID NO: 681 - protein, 10 aa, synthetic construct
  REGION 1..10: note = Synthetic
RAAKRKYFAV

SEQ ID NO: 682 - protein, 16 aa, synthetic construct
  REGION 1..16: note = Synthetic
KRPAATKKAGQAKKKK

SEQ ID NO: 683 - protein, 8 aa, synthetic construct
  REGION 1..8: note = Synthetic
PKKKRKVE

SEQ ID NO: 684 - protein, 7 aa, synthetic construct
  REGION 1..7: note = Synthetic
KKKRKVE

SEQ ID NO: 685 - protein, 19 aa, synthetic construct
  REGION 1..19: note = Synthetic
KRTADGSEFESPKKKRKVE

SEQ ID NO: 686 - protein, 9 aa, synthetic construct
  REGION 1..9: note = Synthetic
PAAKKKKLD

SEQ ID NO: 687-700 - skipped (14 entries)

SEQ ID NO: 701 - RNA, 3793 nt, synthetic construct
  misc_feature 1..3793: note = Synthetic
  source 1..3793: mol_type = other RNA
gggaagctcagaataaacgctcaactttggccggatctgccaccatggacggctccggcggcggctcccccaagaagaagcggaaggtggaggacaagcggcccgccgccaccaagaaggccggccaggccaagaagaagaagggcggctccggcggcggcgccgccttcaagcccaaccccatcaactacatcctgggcctggacatcggcatcgcctccgtgggctgggccatggtggagatcgacgaggaggagaaccccatccggctgatcgacctgggcgtgcgggtgttcgagcgggccgaggtgcccaagaccggcgactccctggccatggcccggcggctggcccggtccgtgcggcggctgacccggcggcgggcccaccggctgctgcgggcccggcggctgctgaagcgggagggcgtgctgcaggccgccgacttcgacgagaacggcctgatcaagtccctgcccaacaccccctggcagctgcgggccgccgccctggaccggaagctgacccccctggagtggtccgccgtgctgctgcacctgatcaagcaccggggctacctgtcccagcggaagaacgagggcgagaccgccgacaaggagctgggcgccctgctgaagggcgtggccaacaacgcccacgccctgcagaccggcgacttccggacccccgccgagctggccctgaacaagttcgagaaggagtccggccacatccggaaccagcggggcgactactcccacaccttctcccggaaggacctgcaggccgagctgatcctgctgttcgagaagcagaaggagttcggcaacccccacgtgtccggcggcctgaaggagggcatcgagaccctgctgatgacccagcggcccgccctgtccggcgacgccgtgcagaagatgctgggccactgcaccttcgagcccgccgagcccaaggccgccaagaacacctacaccgccgagcggttcatctggctgaccaagctgaacaacctgcggatcctggagcagggctccgagcggcccctgaccgacaccgagcgggccaccctgatggacgagccctaccggaagtccaagctgacctacgcccaggcccggaagctgctgggcctggaggacaccgccttcttcaagggcctgcggtacggcaaggacaacgccgaggcctccaccctgatggagatgaaggcctaccacgccatctcccgggccctggagaaggagggcctgaaggacaagaagtcccccctgaacctgtcctccgagctgcaggacgagatcggcaccgccttctccctgttcaagaccgacgaggacatcaccggccggctgaaggaccgggtgcagcccgagatcctggaggccctgctgaagcacatctccttcgacaagttcgtgcagatctccctgaaggccctgcggcggatcgtgcccctgatggagcagggcaagcggtacgacgaggcctgcgccgagatctacggcgaccactacggcaagaagaacaccgaggagaagatctacctgccccccatccccgccgacgagatccggaaccccgtggtgctgcgggccctgtcccaggcccggaaggtgatcaacggcgtggtgcggcggtacggctcccccgcccggatccacatcgagaccgcccgggaggtgggcaagtccttcaaggaccggaaggagatcgagaagcggcaggaggagaaccggaaggaccgggagaaggccgccgccaagttccgggagtacttccccaacttcgtgggcgagcccaagtccaaggacatcctgaagctgcggctgtacgagcagcagcacggcaagtgcctgtactccggcaaggagatcaacctggtgcggctgaacgagaagggctacgtggagatcgaccacgccctgcccttctcccggacctgggacgactccttcaacaacaaggtgctggtgctgggctccgagaaccagaacaagggcaaccagaccccctacgagtacttcaacggcaaggacaactcccgggagtggcaggagttcaaggcccgggtggagacctcccggttcccccggtccaagaagcagcggatcctgctgcagaagttcgacgaggacggcttcaaggagtgcaacctgaacgacacccggtacgtgaaccggttcctgtgccagttcgtggccgaccacatcctgctgaccggcaagggcaagcggcgggtgttcgcctccaacggccagatcaccaacctgctgcggggcttctggggcctgcggaaggtgcgggccgagaacgaccggcaccacgccctggacgccgtggtggtggcctgctccaccgtggccatgcagcagaagatcacccggttcgtgcggtacaaggagatgaacgccttcgacggcaagaccatcgacaaggagaccggcaaggtgctgcaccagaagacccacttcccccagccctgggagttcttcgcccaggaggtgatgatccgggtgttcggcaagcccgacggcaagcccgagttcgaggaggccgacacccccgagaagctgcggaccctgctggccgagaagctgtcctcccggcccgaggccgtgcacgagtacgtgacccccctgttcgtgtcccgggcccccaaccggaagatgtccggcgcccacaaggacaccctgcggtccgccaagcggttcgtgaagcacaacgagaagatctccgtgaagcgggtgtggctgaccgagatcaagctggccgacctggagaacatggtgaactacaagaacggccgggagatcgagctgtacgaggccctgaaggcccggctggaggcctacggcggcaacgccaagcaggccttcgaccccaaggacaaccccttctacaagaagggcggccagctggtgaaggccgtgcgggtggagaagacccaggagtccggcgtgctgctgaacaagaagaacgcctacaccatcgccgacaacggcgacatggtgcgggtggacgtgttctgcaaggtggacaagaagggcaagaaccagtacttcatcgtgcccatctacgcctggcaggtggccgagaacatcctgcccgacatcgactgcaagggctaccggatcgacgactcctacaccttctgcttctccctgcacaagtacgacctgatcgccttccagaaggacgagaagtccaaggtggagttcgcctactacatcaactgcgactcctccaacggccggttctacctggcctggcacgacaagggctccaaggagcagcagttccggatctccacccagaacctggtgctgatccagaagtaccaggtgaacgagctgggcaaggagatccggccctgccggctgaagaagcggccccccgtgcggtagctagcaccagcctcaagaacacccgaatggagtctctaagctacataataccaacttacactttacaaaatgttgtcccccaaaatgtagccattcgtatctgctcctaataaaaagaaagtttcttcacattctcaaaaaaaaaaaaaaaaaaaaaaaaaaaaaaaaaaaaaaaaaaaaaaaaaaaaaaaaaaaaaaaaaaaaaaaaaaaaaaaaaaaaaaaaaaaaaaaaaaaaaaaaaaaaaaaaaaaaaaaaaaaaaaaaaaaaaaaaaaaaaaaaaaaaaaaaaaaaaaaaaaaaaaaaaaaaaaaaaaaaaaaaaaaaaaaaaaaaaaaaaaaaaaaaaaaaaaaaaaaaaaaaaaaaaaaaaaaaaaaaaaaaaaaaaa

SEQ ID NO: 702 - RNA, 3684 nt, synthetic construct
  misc_feature 1..3684: note = Synthetic
  source 1..3684: mol_type = other RNA
gggtcccgcagtcggcgtccagcggctctgcttgttcgtgtgtgtgtcgttgcaggccttattcggatccgccaccatggcagcattcaagccgaactcgatcaactacatcctgggactggacatcggaatcgcatcggtcggatgggcaatggtcgaaatcgacgaagaagaaaacccgatcagactgatcgacctgggagtcagagtcttcgaaagagcagaagtcccgaagacaggagactcgctggcaatggcaagaagactggcaagatcggtcagaagactgacaagaagaagagcacacagactgctgagaacaagaagactgctgaagagagaaggagtcctgcaggcagcaaacttcgacgaaaacggactgatcaagtcgctgccgaacacaccgtggcagctgagagcagcagcactggacagaaagctgacaccgctggaatggtcggcagtcctgctgcacctgatcaagcacagaggatacctgtcgcagagaaagaacgaaggagaaacagcagacaaggaactgggagcactgctgaagggagtcgcaggaaacgcacacgcactgcagacaggagacttcagaacaccggcagaactggcactgaacaagttcgaaaaggaatcgggacacatcagaaaccagagatcggactactcgcacacattctcgagaaaggacctgcaggcagaactgatcctgctgttcgaaaagcagaaggaattcggaaacccgcacgtctcgggaggactgaaggaaggaatcgaaacactgctgatgacacagagaccggcactgtcgggagacgcagtccagaagatgctgggacactgcacattcgaaccggcagaaccgaaggcagcaaagaacacatacacagcagaaagattcatctggctgacaaagctgaacaacctgagaatcctggaacagggatcggaaagaccgctgacagacacagaaagagcaacactgatggacgaaccgtacagaaagtcgaagctgacatacgcacaggcaagaaagctgctgggactggaagacacagcattcttcaagggactgagatacggaaaggacaacgcagaagcatcgacactgatggaaatgaaggcataccacgcaatctcgagagcactggaaaaggaaggactgaaggacaagaagtcgccgctgaacctgtcgccggaactgcaggacgaaatcggaacagcattctcgctgttcaagacagacgaagacatcacaggaagactgaaggacagaatccagccggaaatcctggaagcactgctgaagcacatctcgttcgacaagttcgtccagatctcgctgaaggcactgagaagaatcgtcccgctgatggaacagggaaagagatacgacgaagcatgcgcagaaatctacggagaccactacggaaagaagaacacagaagaaaagatctacctgccgccgatcccggcagacgaaatcagaaacccggtcgtcctgagagcactgtcgcaggcaagaaaggtcatcaacggagtcgtcagaagatacggatcgccggcaagaatccacatcgaaacagcaagagaagtcggaaagtcgttcaaggacagaaaggaaatcgaaaagagacaggaagaaaacagaaaggacagagaaaaggcagcagcaaagttcagagaatacttcccgaacttcgtcggagaaccgaagtcgaaggacatcctgaagctgagactgtacgaacagcagcacggaaagtgcctgtactcgggaaaggaaatcaacctgggaagactgaacgaaaagggatacgtcgaaatcgaccacgcactgccgttctcgagaacatgggacgactcgttcaacaacaaggtcctggtcctgggatcggaaaaccagaacaagggaaaccagacaccgtacgaatacttcaacggaaaggacaactcgagagaatggcaggaattcaaggcaagagtcgaaacatcgagattcccgagatcgaagaagcagagaatcctgctgcagaagttcgacgaagacggattcaaggaaagaaacctgaacgacacaagatacgtcaacagattcctgtgccagttcgtcgcagacagaatgagactgacaggaaagggaaagaagagagtcttcgcatcgaacggacagatcacaaacctgctgagaggattctggggactgagaaaggtcagagcagaaaacgacagacaccacgcactggacgcagtcgtcgtcgcatgctcgacagtcgcaatgcagcagaagatcacaagattcgtcagatacaaggaaatgaacgcattcgacggaaagacaatcgacaaggaaacaggagaagtcctgcaccagaagacacacttcccgcagccgtgggaattcttcgcacaggaagtcatgatcagagtcttcggaaagccggacggaaagccggaattcgaagaagcagacacactggaaaagctgagaacactgctggcagaaaagctgtcgtcgagaccggaagcagtccacgaatacgtcacaccgctgttcgtctcgagagcaccgaacagaaagatgtcgggacagggacacatggaaacagtcaagtcggcaaagagactggacgaaggagtctcggtcctgagagtcccgctgacacagctgaagctgaaggacctggaaaagatggtcaacagagaaagagaaccgaagctgtacgaagcactgaaggcaagactggaagcacacaaggacgacccggcaaaggcattcgcagaaccgttctacaagtacgacaaggcaggaaacagaacacagcaggtcaaggcagtcagagtcgaacaggtccagaagacaggagtctgggtcagaaaccacaacggaatcgcagacaacgcaacaatggtcagagtagacgtcttcgaaaagggagacaagtactacctggtcccgatctactcgtggcaggtcgcaaagggaatcctgccggacagagcagtcgtccagggaaaggacgaagaagactggcagctgatcgacgactcgttcaacttcaagttctcgctgcacccgaacgacctggtcgaagtcatcacaaagaaggcaagaatgttcggatacttcgcatcgtgccacagaggaacaggaaacatcaacatcagaatccacgacctggaccacaagatcggaaagaacggaatcctggaaggaatcggagtcaagacagcactgtcgttccagaagtaccagatcgacgaactgggaaaggaaatcagaccgtgcagactgaagaagagaccgccggtcagatccggaaagagaacagcagacggatcggaattcgaatcgccgaagaagaagagaaaggtcgaatgatagctagccatcacatttaaaagcatctcagcctaccatgagaataagagaaagaaaatgaagatcaatagcttattcatctctttttctttttcgttggtgtaaagccaacaccctgtctaaaaaacataaatttctttaatcattttgcctcttttctctgtgcttcaattaataaaaaatggaaagaacctcgagaaaaaaaaaaaaaaaaaaaaaaaaaaaaaaaaaaaaaaaaaaaaaaaaaaaaaaaaaaaaaaaaaaaaaaaaaaaaaaaaaaaaaaaaaaaaatctag

SEQ ID NO: 703 - RNA, 3975 nt, synthetic construct
  misc_feature 1..3975: note = Synthetic
  source 1..3975: mol_type = other RNA
gggaagctcagaataaacgctcaactttggccggatctgccaccatggacggctccggcggcggctcccccaagaagaagcggaaggtggaggacaagcggcccgccgccaccaagaaggccggccaggccaagaagaagaagggcggctccggcggcggcgccgccttcaagcccaaccccatcaactacatcctgggcctggacatcggcatcgcctccgtgggctgggccatggtggagatcgacgaggaggagaaccccatccggctgatcgacctgggcgtgcgggtgttcgagcgggccgaggtgcccaagaccggcgactccctggccatggcccggcggctggcccggtccgtgcggcggctgacccggcggcgggcccaccggctgctgcgggcccggcggctgctgaagcgggagggcgtgctgcaggccgccgacttcgacgagaacggcctgatcaagtccctgcccaacaccccctggcagctgcgggccgccgccctggaccggaagctgacccccctggagtggtccgccgtgctgctgcacctgatcaagcaccggggctacctgtcccagcggaagaacgagggcgagaccgccgacaaggagctgggcgccctgctgaagggcgtggccaacaacgcccacgccctgcagaccggcgacttccggacccccgccgagctggccctgaacaagttcgagaaggagtccggccacatccggaaccagcggggcgactactcccacaccttctcccggaaggacctgcaggccgagctgatcctgctgttcgagaagcagaaggagttcggcaacccccacgtgtccggcggcctgaaggagggcatcgagaccctgctgatgacccagcggcccgccctgtccggcgacgccgtgcagaagatgctgggccactgcaccttcgagcccgccgagcccaaggccgccaagaacacctacaccgccgagcggttcatctggctgaccaagctgaacaacctgcggatcctggagcagggctccgagcggcccctgaccgacaccgagcgggccaccctgatggacgagccctaccggaagtccaagctgacctacgcccaggcccggaagctgctgggcctggaggacaccgccttcttcaagggcctgcggtacggcaaggacaacgccgaggcctccaccctgatggagatgaaggcctaccacgccatctcccgggccctggagaaggagggcctgaaggacaagaagtcccccctgaacctgtcctccgagctgcaggacgagatcggcaccgccttctccctgttcaagaccgacgaggacatcaccggccggctgaaggaccgggtgcagcccgagatcctggaggccctgctgaagcacatctccttcgacaagttcgtgcagatctccctgaaggccctgcggcggatcgtgcccctgatggagcagggcaagcggtacgacgaggcctgcgccgagatctacggcgaccactacggcaagaagaacaccgaggagaagatctacctgccccccatccccgccgacgagatccggaaccccgtggtgctgcgggccctgtcccaggcccggaaggtgatcaacggcgtggtgcggcggtacggctcccccgcccggatccacatcgagaccgcccgggaggtgggcaagtccttcaaggaccggaaggagatcgagaagcggcaggaggagaaccggaaggaccgggagaaggccgccgccaagttccgggagtacttccccaacttcgtgggcgagcccaagtccaaggacatcctgaagctgcggctgtacgagcagcagcacggcaagtgcctgtactccggcaaggagatcaacctggtgcggctgaacgagaagggctacgtggagatcgaccacgccctgcccttctcccggacctgggacgactccttcaacaacaaggtgctggtgctgggctccgagaaccagaacaagggcaaccagaccccctacgagtacttcaacggcaaggacaactcccgggagtggcaggagttcaaggcccgggtggagacctcccggttcccccggtccaagaagcagcggatcctgctgcagaagttcgacgaggacggcttcaaggagtgcaacctgaacgacacccggtacgtgaaccggttcctgtgccagttcgtggccgaccacatcctgctgaccggcaagggcaagcggcgggtgttcgcctccaacggccagatcaccaacctgctgcggggcttctggggcctgcggaaggtgcgggccgagaacgaccggcaccacgccctggacgccgtggtggtggcctgctccaccgtggccatgcagcagaagatcacccggttcgtgcggtacaaggagatgaacgccttcgacggcaagaccatcgacaaggagaccggcaaggtgctgcaccagaagacccacttcccccagccctgggagttcttcgcccaggaggtgatgatccgggtgttcggcaagcccgacggcaagcccgagttcgaggaggccgacacccccgagaagctgcggaccctgctggccgagaagctgtcctcccggcccgaggccgtgcacgagtacgtgacccccctgttcgtgtcccgggcccccaaccggaagatgtccggcgcccacaaggacaccctgcggtccgccaagcggttcgtgaagcacaacgagaagatctccgtgaagcgggtgtggctgaccgagatcaagctggccgacctggagaacatggtgaactacaagaacggccgggagatcgagctgtacgaggccctgaaggcccggctggaggcctacggcggcaacgccaagcaggccttcgaccccaaggacaaccccttctacaagaagggcggccagctggtgaaggccgtgcgggtggagaagacccaggagtccggcgtgctgctgaacaagaagaacgcctacaccatcgccgacaacggcgacatggtgcgggtggacgtgttctgcaaggtggacaagaagggcaagaaccagtacttcatcgtgcccatctacgcctggcaggtggccgagaacatcctgcccgacatcgactgcaagggctaccggatcgacgactcctacaccttctgcttctccctgcacaagtacgacctgatcgccttccagaaggacgagaagtccaaggtggagttcgcctactacatcaactgcgactcctccaacggccggttctacctggcctggcacgacaagggctccaaggagcagcagttccggatctccacccagaacctggtgctgatccagaagtaccaggtgaacgagctgggcaaggagatccggccctgccggctgaagaagcggccccccgtgcggtccgagtccgccacccccgagtccgtgtccggctggcggctgttcaagaagatctcctagctagcaccagcctcaagaacacccgaatggagtctctaagctacataataccaacttacactttacaaaatgttgtcccccaaaatgtagccattcgtatctgctcctaataaaaagaaagtttcttcacattctaaaaaaaaaaaatggaaaaaaaaaaaacggaaaaaaaaaaaaggtaaaaaaaaaaaatataaaaaaaaaaaacataaaaaaaaaaaacgaaaaaaaaaaaacgtaaaaaaaaaaaactcaaaaaaaaaaaagataaaaaaaaaaaacctaaaaaaaaaaaatgtaaaaaaaaaaaagggaaaaaaaaaaaacgcaaaaaaaaaaaacacaaaaaaaaaaaatgcaaaaaaaaaaaatcgaaaaaaaaaaaatctaaaaaaaaaaaacgaaaaaaaaaaaacccaaaaaaaaaaaagacaaaaaaaaaaaatagaaaaaaaaaaaagttaaaaaaaaaaaactgaaaaaaaaaaaatttaaaaaaaaaaaatctcga

SEQ ID NO: 704 - RNA, 3975 nt, synthetic construct
  misc_feature 1..3975: note = Synthetic
  source 1..3975: mol_type = other RNA
gggaagctcagaataaacgctcaactttggccggatctgccaccatggacggctccggcggcggctcccccaagaagaagcggaaggtggaggacaagcggcccgccgccaccaagaaggccggccaggccaagaagaagaagggcggctccggcggcggcgcagcattcaagccaaactcaatcaattacatcctgggactggacatcggcatcgcatccgtcgggtgggctatggtcgaaatcgacgaggaggagaaccccatccgcctgatcgatctgggcgtgcgcgtgtttgagagggcagaggtgcctaagaccggcgacagcctggccatggcacggagactggcacgctccgtgaggcgcctgacccggagaagggcccacagactgctgaggacacgccggctgctgaagagggagggcgtgctgcaggccgccaacttcgatgagaatggcctgatcaagtccctgcccaataccccttggcagctgagggcagccgccctggaccgcaagctgacacctctggagtggtccgccgtgctgctgcacctgatcaagcaccggggctacctgtctcagagaaagaacgagggcgagacagccgataaggagctgggcgccctgctgaagggagtggcaggaaatgcacacgccctgcagaccggcgactttcgcacaccagccgagctggccctgaacaagttcgagaaggagagcggccacatccgcaatcagcggtctgactatagccacaccttctcccggaaggatctgcaggccgagctgatcctgctgtttgagaagcagaaggagttcggcaacccacacgtgtctggcggcctgaaggagggcatcgagacactgctgatgacacagcggcccgccctgagcggcgacgcagtgcagaagatgctgggacactgcacctttgagccagccgagcccaaggccgccaagaatacctacacagccgagcggttcatctggctgacaaagctgaacaatctgaggatcctggagcagggaagcgagcgcccactgaccgacacagagagggccaccctgatggatgagccctaccgcaagtccaagctgacatatgcacaggcaaggaagctgctgggcctggaggacaccgccttctttaagggcctgagatacggcaaggataacgccgaggcctctacactgatggagatgaaggcctatcacgccatcagcagggccctggagaaggagggcctgaaggacaagaagtccccactgaatctgtctcccgagctgcaggatgagatcggcaccgcctttagcctgttcaagaccgacgaggatatcacaggcagactgaaggacaggatccagccagagatcctggaggccctgctgaagcacatcagctttgataagttcgtgcagatcagcctgaaggccctgcggaggatcgtgccactgatggagcagggcaagaggtacgacgaggcctgcgccgaaatctacggcgatcactatggcaagaagaacacagaggagaaaatctacctgccccctatccccgccgatgagatcaggaaccctgtggtgctgcgcgccctgtctcaggcaagaaaagtgatcaacggagtggtgcgccggtacggcagccccgccagaatccacatcgagacagccagggaagtgggcaagtcctttaaggacagaaaggagatcgagaagaggcaggaggagaacagaaaggatagggagaaggccgccgccaagttcagagagtactttcctaatttcgtgggcgagccaaagtccaaggatatcctgaagctgaggctgtacgagcagcagcacggcaagtgtctgtattctggcaaggagatcaacctgggccgcctgaatgagaagggctatgtggagatcgaccacgccctgcctttttctcggacctgggacgatagcttcaacaataaggtgctggtgctgggctctgagaaccagaataagggcaaccagacaccctacgagtatttcaacggcaaggacaatagccgcgagtggcaggagtttaaggcaagggtggagacaagcaggttccctcggtccaagaagcagagaatcctgctgcagaagtttgacgaggatggcttcaaggagaggaacctgaatgacacccgctacgtgaatcggtttctgtgccagttcgtggccgatagaatgaggctgaccggcaagggcaagaagagagtgtttgcctccaacggccagatcacaaatctgctgaggggcttctggggcctgagaaaggtgagggcagagaacgacaggcaccacgcactggatgcagtggtggtggcatgttctaccgtggccatgcagcagaagatcacacgctttgtgcggtataaggagatgaatgccttcgacggcaagaccatcgataaggagacaggcgaggtgctgcaccagaagacacactttcctcagccatgggagttctttgcccaggaagtgatgatccgggtgtttggcaagcctgacggcaagccagagttcgaggaggccgataccctggagaagctgagaacactgctggcagagaagctgagctccaggcccgaggcagtgcacgagtacgtgaccccactgttcgtgtctagagcccccaacaggaagatgagcggccagggccacatggagacagtgaagtccgccaagagactggacgagggcgtgtctgtgctgagggtgcctctgacacagctgaagctgaaggatctggagaagatggtgaatcgcgagcgggagccaaagctgtatgaggccctgaaggcaaggctggaggcacacaaggacgatcctgccaaggcctttgccgagccattctacaagtatgataaggccggcaacagaacccagcaggtgaaggccgtgagggtggagcaggtgcagaagacaggcgtgtgggtgcgcaaccacaatggcatcgccgacaatgctaccatggtgcgggtggacgtgtttgagaagggcgataagtactatctggtgcccatctacagctggcaggtggccaagggcatcctgcctgatagagccgtggtgcagggcaaggacgaggaggattggcagctgatcgacgattccttcaactttaagttctctctgcaccccaatgacctggtggaagtgatcaccaagaaggccaggatgtttggctacttcgcctcctgccaccgcggcacaggcaacatcaatatccggatccacgacctggatcacaagatcggcaagaacggcatcctggagggcatcggcgtgaagacagccctgagcttccagaagtatcagatcgacgagctgggcaaggagatcagaccttgtaggctgaagaagcgcccacccgtgcggtccgagtccgccacccccgagtccgtgtccggctggcggctgttcaagaagatctcctagctagcaccagcctcaagaacacccgaatggagtctctaagctacataataccaacttacactttacaaaatgttgtcccccaaaatgtagccattcgtatctgctcctaataaaaagaaagtttcttcacattctaaaaaaaaaaaatggaaaaaaaaaaaacggaaaaaaaaaaaaggtaaaaaaaaaaaatataaaaaaaaaaaacataaaaaaaaaaaacgaaaaaaaaaaaacgtaaaaaaaaaaaactcaaaaaaaaaaaagataaaaaaaaaaaacctaaaaaaaaaaaatgtaaaaaaaaaaaagggaaaaaaaaaaaacgcaaaaaaaaaaaacacaaaaaaaaaaaatgcaaaaaaaaaaaatcgaaaaaaaaaaaatctaaaaaaaaaaaacgaaaaaaaaaaaacccaaaaaaaaaaaagacaaaaaaaaaaaatagaaaaaaaaaaaagttaaaaaaaaaaaactgaaaaaaaaaaaatttaaaaaaaaaaaatctcga

SEQ ID NO: 705 - RNA, 3975 nt, synthetic construct
  misc_feature 1..3975: note = Synthetic
  source 1..3975: mol_type = other RNA
gggaagctcagaataaacgctcaactttggccggatctgccaccatggacggctccggcggcggctcccccaagaagaagcggaaggtggaggacaagcggcccgccgccaccaagaaggccggccaggccaagaagaagaagggcggctccggcggcggcgccgccttcaagcccaactccatcaactacatcctgggcctggacatcggcatcgcctccgtgggctgggccatggtggagatcgacgaggaggagaaccccatccggctgatcgacctgggcgtgcgggtgttcgagcgggccgaggtgcccaagaccggcgactccctggccatggcccggcggctggcccggtccgtgcggcggctgacccggcggcgggcccaccggctgctgcggacccggcggctgctgaagcgggagggcgtgctgcaggccgccaacttcgacgagaacggcctgatcaagtccctgcccaacaccccctggcagctgcgggccgccgccctggaccggaagctgacccccctggagtggtccgccgtgctgctgcacctgatcaagcaccggggctacctgtcccagcggaagaacgagggcgagaccgccgacaaggagctgggcgccctgctgaagggcgtggccggcaacgcccacgccctgcagaccggcgacttccggacccccgccgagctggccctgaacaagttcgagaaggagtccggccacatccggaaccagcggtccgactactcccacaccttctcccggaaggacctgcaggccgagctgatcctgctgttcgagaagcagaaggagttcggcaacccccacgtgtccggcggcctgaaggagggcatcgagaccctgctgatgacccagcggcccgccctgtccggcgacgccgtgcagaagatgctgggccactgcaccttcgagcccgccgagcccaaggccgccaagaacacctacaccgccgagcggttcatctggctgaccaagctgaacaacctgcggatcctggagcagggctccgagcggcccctgaccgacaccgagcgggccaccctgatggacgagccctaccggaagtccaagctgacctacgcccaggcccggaagctgctgggcctggaggacaccgccttcttcaagggcctgcggtacggcaaggacaacgccgaggcctccaccctgatggagatgaaggcctaccacgccatctcccgggccctggagaaggagggcctgaaggacaagaagtcccccctgaacctgtcccccgagctgcaggacgagatcggcaccgccttctccctgttcaagaccgacgaggacatcaccggccggctgaaggaccggatccagcccgagatcctggaggccctgctgaagcacatctccttcgacaagttcgtgcagatctccctgaaggccctgcggcggatcgtgcccctgatggagcagggcaagcggtacgacgaggcctgcgccgagatctacggcgaccactacggcaagaagaacaccgaggagaagatctacctgccccccatccccgccgacgagatccggaaccccgtggtgctgcgggccctgtcccaggcccggaaggtgatcaacggcgtggtgcggcggtacggctcccccgcccggatccacatcgagaccgcccgggaggtgggcaagtccttcaaggaccggaaggagatcgagaagcggcaggaggagaaccggaaggaccgggagaaggccgccgccaagttccgggagtacttccccaacttcgtgggcgagcccaagtccaaggacatcctgaagctgcggctgtacgagcagcagcacggcaagtgcctgtactccggcaaggagatcaacctgggccggctgaacgagaagggctacgtggagatcgaccacgccctgcccttctcccggacctgggacgactccttcaacaacaaggtgctggtgctgggctccgagaaccagaacaagggcaaccagaccccctacgagtacttcaacggcaaggacaactcccgggagtggcaggagttcaaggcccgggtggagacctcccggttcccccggtccaagaagcagcggatcctgctgcagaagttcgacgaggacggcttcaaggagcggaacctgaacgacacccggtacgtgaaccggttcctgtgccagttcgtggccgaccggatgcggctgaccggcaagggcaagaagcgggtgttcgcctccaacggccagatcaccaacctgctgcggggcttctggggcctgcggaaggtgcgggccgagaacgaccggcaccacgccctggacgccgtggtggtggcctgctccaccgtggccatgcagcagaagatcacccggttcgtgcggtacaaggagatgaacgccttcgacggcaagaccatcgacaaggagaccggcgaggtgctgcaccagaagacccacttcccccagccctgggagttcttcgcccaggaggtgatgatccgggtgttcggcaagcccgacggcaagcccgagttcgaggaggccgacaccctggagaagctgcggaccctgctggccgagaagctgtcctcccggcccgaggccgtgcacgagtacgtgacccccctgttcgtgtcccgggcccccaaccggaagatgtccggccagggccacatggagaccgtgaagtccgccaagcggctggacgagggcgtgtccgtgctgcgggtgcccctgacccagctgaagctgaaggacctggagaagatggtgaaccgggagcgggagcccaagctgtacgaggccctgaaggcccggctggaggcccacaaggacgaccccgccaaggccttcgccgagcccttctacaagtacgacaaggccggcaaccggacccagcaggtgaaggccgtgcgggtggagcaggtgcagaagaccggcgtgtgggtgcggaaccacaacggcatcgccgacaacgccaccatggtgcgggtggacgtgttcgagaagggcgacaagtactacctggtgcccatctactcctggcaggtggccaagggcatcctgcccgaccgggccgtggtgcagggcaaggacgaggaggactggcagctgatcgacgactccttcaacttcaagttctccctgcaccccaacgacctggtggaggtgatcaccaagaaggcccggatgttcggctacttcgcctcctgccaccggggcaccggcaacatcaacatccggatccacgacctggaccacaagatcggcaagaacggcatcctggagggcatcggcgtgaagaccgccctgtccttccagaagtaccagatcgacgagctgggcaaggagatccggccctgccggctgaagaagcggccccccgtgcggtccgagtccgccacccccgagtccgtgtccggctggcggctgttcaagaagatctcctagctagcaccagcctcaagaacacccgaatggagtctctaagctacataataccaacttacactttacaaaatgttgtcccccaaaatgtagccattcgtatctgctcctaataaaaagaaagtttcttcacattctaaaaaaaaaaaatggaaaaaaaaaaaacggaaaaaaaaaaaaggtaaaaaaaaaaaatataaaaaaaaaaaacataaaaaaaaaaaacgaaaaaaaaaaaacgtaaaaaaaaaaaactcaaaaaaaaaaaagataaaaaaaaaaaacctaaaaaaaaaaaatgtaaaaaaaaaaaagggaaaaaaaaaaaacgcaaaaaaaaaaaacacaaaaaaaaaaaatgcaaaaaaaaaaaatcgaaaaaaaaaaaatctaaaaaaaaaaaacgaaaaaaaaaaaacccaaaaaaaaaaaagacaaaaaaaaaaaatagaaaaaaaaaaaagttaaaaaaaaaaaactgaaaaaaaaaaaatttaaaaaaaaaaaatctcga

SEQ ID NO: 706 - RNA, 3974 nt, synthetic construct
  misc_feature 1..3974: note = Synthetic
  source 1..3974: mol_type = other RNA
gggaagctcagaataaacgctcaactttggccggatctgccaccatggacggctccggcggcggctcccccaagaagaagcggaaggtggaggacaagcggcccgccgccaccaagaaggccggccaggccaagaagaagaagggcggctccggcggcgccgccttcaagcccaaccccatcaactacatcctgggcctggacatcggcatcgcctccgtgggctgggccatggtggagatcgacgaggaggagaaccccatccggctgatcgacctgggcgtgcgggtgttcgagcgggccgaggtgcccaagaccggcgactccctggccatggcccggcggctggcccggtccgtgcggcggctgacccggcggcgggcccaccggctgctgcgggcccggcggctgctgaagcgggagggcgtgctgcaggccgccgacttcgacgagaacggcctgatcaagtccctgcccaacaccccctggcagctgcgggccgccgccctggaccggaagctgacccccctggagtggtccgccgtgctgctgcacctgatcaagcaccggggctacctgtcccagcggaagaacgagggcgagaccgccgacaaggagctgggcgccctgctgaagggcgtggccgacaacgcccacgccctgcagaccggcgacttccggacccccgccgagctggccctgaacaagttcgagaaggagtgcggccacatccggaaccagcggggcgactactcccacaccttctcccggaaggacctgcaggccgagctgaacctgctgttcgagaagcagaaggagttcggcaacccccacgtgtccggcggcctgaaggagggcatcgagaccctgctgatgacccagcggcccgccctgtccggcgacgccgtgcagaagatgctgggccactgcaccttcgagcccgccgagcccaaggccgccaagaacacctacaccgccgagcggttcatctggctgaccaagctgaacaacctgcggatcctggagcagggctccgagcggcccctgaccgacaccgagcgggccaccctgatggacgagccctaccggaagtccaagctgacctacgcccaggcccggaagctgctgtccctggaggacaccgccttcttcaagggcctgcggtacggcaaggacaacgccgaggcctccaccctgatggagatgaaggcctaccacaccatctcccgggccctggagaaggagggcctgaaggacaagaagtcccccctgaacctgtcccccgagctgcaggacgagatcggcaccgccttctccctgttcaagaccgacgaggacatcaccggccggctgaaggaccggatccagcccgagatcctggaggccctgctgaagcacatctccttcgacaagttcgtgcagatctccctgaaggccctgcggcggatcgtgcccctgatggagcagggcaagcggtacgacgaggcctgcgccgagatctacggcgaccactacggcaagaagaacaccgaggagaagatctacctgccccccatccccgccgacgagatccggaaccccgtggtgctgcgggccctgtcccaggcccggaaggtgatcaacggcgtggtgcggcggtacggctcccccgcccggatccacatcgagaccgcccgggaggtgggcaagtccttcaaggaccggaaggagatcgagaagcggcaggaggagaaccggaaggaccgggagaaggccgccgccaagttccgggagtacttccccaacttcgtgggcgagcccaagtccaaggacatcctgaagctgcggctgtacgagcagcagcacggcaagtgcctgtactccggcaaggagatcaacctgggccggctgaacgagaagggctacgtggagatcgaccacgccctgcccttctcccggacctgggacgactccttcaacaacaaggtgctggtgctgggctccgagaaccagaacaagggcaaccagaccccctacgagtacttcaacggcaaggacaactcccgggagtggcaggagttcaaggcccgggtggagacctcccggttcccccggtccaagaagcagcggatcctgctgcagaagttcgacgaggacggcttcaaggagcggaacctgaacgacacccggtacgtgaaccggttcctgtgccagttcgtggccgaccggatgcggctgaccggcaagggcaagaagcgggtgttcgcctccaacggccagatcaccaacctgctgcggggcttctggggcctgcggaaggtgcgggccgagaacgaccggcaccacgccctggacgccgtggtggtggcctgctccaccgtggccatgcagcagaagatcacccggttcgtgcggtacaaggagatgaacgccttcgacggcaagaccatcgacaaggagaccggcgaggtgctgcaccagaagacccacttcccccagccctgggagttcttcgcccaggaggtgatgatccgggtgttcggcaagcccgacggcaagcccgagttcgaggaggccgacacccccgagaagctgcggaccctgctggccgagaagctgtcctcccggcccgaggccgtgcacgagtacgtgacccccctgttcgtgtcccgggcccccaaccggaagatgtccggccagggccacatggagaccgtgaagtccgccaagcggctggacgagggcgtgtccgtgctgcgggtgcccctgacccagctgaagctgaaggacctggagaagatggtgaaccgggagcgggagcccaagctgtacgaggccctgaaggcccggctggaggcccacaaggacgaccccgccaaggccttcgccgagcccttctacaagtacgacaaggccggcaaccggacccagcaggtgaaggccgtgcgggtggagcaggtgcagaagaccggcgtgtgggtgcggaaccacaacggcatcgccgacaacgccaccatggtgcgggtggacgtgttcgagaagggcgacaagtactacctggtgcccatctactcctggcaggtggccaagggcatcctgcccgaccgggccgtggtggcctacgccgacgaggaggactggaccgtgatcgacgagtccttccggttcaagttcgtgctgtactccaacgacctgatcaaggtgcagctgaagaaggactccttcctgggctacttctccggcctggaccgggccaccggcgccatctccctgcgggagcacgacctggagaagtccaagggcaaggacggcatgcaccggatcggcgtgaagaccgccctgtccttccagaagtaccagatcgacgagatgggcaaggagatccggccctgccggctgaagaagcggccccccgtgcggtccgagtccgccacccccgagtccgtgtccggctggcggctgttcaagaagatctcctagctagcaccagcctcaagaacacccgaatggagtctctaagctacataataccaacttacactttacaaaatgttgtcccccaaaatgtagccattcgtatctgctcctaataaaaagaaagtttcttcacattctctcgagaaaaaaaaaaaatggaaaaaaaaaaaacggaaaaaaaaaaaaggtaaaaaaaaaaaatataaaaaaaaaaaacataaaaaaaaaaaacgaaaaaaaaaaaacgtaaaaaaaaaaaactcaaaaaaaaaaaagataaaaaaaaaaaacctaaaaaaaaaaaatgtaaaaaaaaaaaagggaaaaaaaaaaaacgcaaaaaaaaaaaacacaaaaaaaaaaaatgcaaaaaaaaaaaatcgaaaaaaaaaaaatctaaaaaaaaaaaacgaaaaaaaaaaaacccaaaaaaaaaaaagacaaaaaaaaaaaatagaaaaaaaaaaaagttaaaaaaaaaaaactgaaaaaaaaaaaatttaaaaaaaaaaaatctag

SEQ ID NO: 707 - protein, 1120 aa, synthetic construct; identical to SEQ ID NO: 614
  REGION 1..1120: note = Synthetic

SEQ ID NO: 708 - protein, 1103 aa, synthetic construct; identical to SEQ ID NO: 605
  REGION 1..1103: note = Synthetic

SEQ ID NO: 709 - protein, 1139 aa, synthetic construct; identical to SEQ ID NO: 615
  REGION 1..1139: note = Synthetic

SEQ ID NO: 710 - protein, 1139 aa, synthetic construct
  REGION 1..1139: note = Synthetic
MDGSGGGSPKKKRKVEDKRPAATKKAGQAKKKKGGSGGGAAFKPNSINYILGLDIGIASVGWAMVEIDEEENPIRLIDLGVRVFERAEVPKTGDSLAMARRLARSVRRLTRRRAHRLLRTRRLLKREGVLQAANFDENGLIKSLPNTPWQLRAAALDRKLTPLEWSAVLLHLIKHRGYLSQRKNEGETADKELGALLKGVAGNAHALQTGDFRTPAELALNKFEKESGHIRNQRSDYSHTFSRKDLQAELILLFEKQKEFGNPHVSGGLKEGIETLLMTQRPALSGDAVQKMLGHCTFEPAEPKAAKNTYTAERFIWLTKLNNLRILEQGSERPLTDTERATLMDEPYRKSKLTYAQARKLLGLEDTAFFKGLRYGKDNAEASTLMEMKAYHAISRALEKEGLKDKKSPLNLSPELQDEIGTAFSLFKTDEDITGRLKDRIQPEILEALLKHISFDKFVQISLKALRRIVPLMEQGKRYDEACAEIYGDHYGKKNTEEKIYLPPIPADEIRNPVVLRALSQARKVINGVVRRYGSPARIHIETAREVGKSFKDRKEIEKRQEENRKDREKAAAKFREYFPNFVGEPKSKDILKLRLYEQQHGKCLYSGKEINLGRLNEKGYVEIDHALPFSRTWDDSFNNKVLVLGSENQNKGNQTPYEYFNGKDNSREWQEFKARVETSRFPRSKKQRILLQKFDEDGFKERNLNDTRYVNRFLCQFVADRMRLTGKGKKRVFASNGQITNLLRGFWGLRKVRAENDRHHALDAVVVACSTVAMQQKITRFVRYKEMNAFDGKTIDKETGEVLHQKTHFPQPWEFFAQEVMIRVFGKPDGKPEFEEADTLEKLRTLLAEKLSSRPEAVHEYVTPLFVSRAPNRKMSGQGHMETVKSAKRLDEGVSVLRVPLTQLKLKDLEKMVNREREPKLYEALKARLEAHKDDPAKAFAEPFYKYDKAGNRTQQVKAVRVEQVQKTGVWVRNHNGIADNATMVRVDVFEKGDKYYLVPIYSWQVAKGILPDRAVVQGKDEEDWQLIDDSFNFKFSLHPNDLVEVITKKARMFGYFASCHRGTGNINIRIHDLDHKIGKNGILEGIGVKTALSFQKYQIDELGKEIRPCRLKKRPPVRSESATPESVSGWRLFKKIS

SEQ ID NO: 711 - protein, 1139 aa, synthetic construct; identical to SEQ ID NO: 710
  REGION 1..1139: note = Synthetic

SEQ ID NO: 712 - protein, 1137 aa, synthetic construct
  REGION 1..1137: note = Synthetic
MDGSGGGSPKKKRKVEDKRPAATKKAGQAKKKKGGSGGAAFKPNPINYILGLDIGIASVGWAMVEIDEEENPIRLIDLGVRVFERAEVPKTGDSLAMARRLARSVRRLTRRRAHRLLRARRLLKREGVLQAADFDENGLIKSLPNTPWQLRAAALDRKLTPLEWSAVLLHLIKHRGYLSQRKNEGETADKELGALLKGVADNAHALQTGDFRTPAELALNKFEKECGHIRNQRGDYSHTFSRKDLQAELNLLFEKQKEFGNPHVSGGLKEGIETLLMTQRPALSGDAVQKMLGHCTFEPAEPKAAKNTYTAERFIWLTKLNNLRILEQGSERPLTDTERATLMDEPYRKSKLTYAQARKLLSLEDTAFFKGLRYGKDNAEASTLMEMKAYHTISRALEKEGLKDKKSPLNLSPELQDEIGTAFSLFKTDEDITGRLKDRIQPEILEALLKHISFDKFVQISLKALRRIVPLMEQGKRYDEACAEIYGDHYGKKNTEEKIYLPPIPADEIRNPVVLRALSQARKVINGVVRRYGSPARIHIETAREVGKSFKDRKEIEKRQEENRKDREKAAAKFREYFPNFVGEPKSKDILKLRLYEQQHGKCLYSGKEINLGRLNEKGYVEIDHALPFSRTWDDSFNNKVLVLGSENQNKGNQTPYEYFNGKDNSREWQEFKARVETSRFPRSKKQRILLQKFDEDGFKERNLNDTRYVNRFLCQFVADRMRLTGKGKKRVFASNGQITNLLRGFWGLRKVRAENDRHHALDAVVVACSTVAMQQKITRFVRYKEMNAFDGKTIDKETGEVLHQKTHFPQPWEFFAQEVMIRVFGKPDGKPEFEEADTPEKLRTLLAEKLSSRPEAVHEYVTPLFVSRAPNRKMSGQGHMETVKSAKRLDEGVSVLRVPLTQLKLKDLEKMVNREREPKLYEALKARLEAHKDDPAKAFAEPFYKYDKAGNRTQQVKAVRVEQVQKTGVWVRNHNGIADNATMVRVDVFEKGDKYYLVPIYSWQVAKGILPDRAVVAYADEEDWTVIDESFRFKFVLYSNDLIKVQLKKDSFLGYFSGLDRATGAISLREHDLEKSKGKDGMHRIGVKTALSFQKYQIDEMGKEIRPCRLKKRPPVRSESATPESVSGWRLFKKIS

SEQ ID NO: 713 - RNA, 3363 nt, synthetic construct
  misc_feature 1..3363: note = Synthetic
  source 1..3363: mol_type = other RNA
atggacggctccggcggcggctcccccaagaagaagcggaaggtggaggacaagcggcccgccgccaccaagaaggccggccaggccaagaagaagaagggcggctccggcggcggcgccgccttcaagcccaaccccatcaactacatcctgggcctggacatcggcatcgcctccgtgggctgggccatggtggagatcgacgaggaggagaaccccatccggctgatcgacctgggcgtgcgggtgttcgagcgggccgaggtgcccaagaccggcgactccctggccatggcccggcggctggcccggtccgtgcggcggctgacccggcggcgggcccaccggctgctgcgggcccggcggctgctgaagcgggagggcgtgctgcaggccgccgacttcgacgagaacggcctgatcaagtccctgcccaacaccccctggcagctgcgggccgccgccctggaccggaagctgacccccctggagtggtccgccgtgctgctgcacctgatcaagcaccggggctacctgtcccagcggaagaacgagggcgagaccgccgacaaggagctgggcgccctgctgaagggcgtggccaacaacgcccacgccctgcagaccggcgacttccggacccccgccgagctggccctgaacaagttcgagaaggagtccggccacatccggaaccagcggggcgactactcccacaccttctcccggaaggacctgcaggccgagctgatcctgctgttcgagaagcagaaggagttcggcaacccccacgtgtccggcggcctgaaggagggcatcgagaccctgctgatgacccagcggcccgccctgtccggcgacgccgtgcagaagatgctgggccactgcaccttcgagcccgccgagcccaaggccgccaagaacacctacaccgccgagcggttcatctggctgaccaagctgaacaacctgcggatcctggagcagggctccgagcggcccctgaccgacaccgagcgggccaccctgatggacgagccctaccggaagtccaagctgacctacgcccaggcccggaagctgctgggcctggaggacaccgccttcttcaagggcctgcggtacggcaaggacaacgccgaggcctccaccctgatggagatgaaggcctaccacgccatctcccgggccctggagaaggagggcctgaaggacaagaagtcccccctgaacctgtcctccgagctgcaggacgagatcggcaccgccttctccctgttcaagaccgacgaggacatcaccggccggctgaaggaccgggtgcagcccgagatcctggaggccctgctgaagcacatctccttcgacaagttcgtgcagatctccctgaaggccctgcggcggatcgtgcccctgatggagcagggcaagcggtacgacgaggcctgcgccgagatctacggcgaccactacggcaagaagaacaccgaggagaagatctacctgccccccatccccgccgacgagatccggaaccccgtggtgctgcgggccctgtcccaggcccggaaggtgatcaacggcgtggtgcggcggtacggctcccccgcccggatccacatcgagaccgcccgggaggtgggcaagtccttcaaggaccggaaggagatcgagaagcggcaggaggagaaccggaaggaccgggagaaggccgccgccaagttccgggagtacttccccaacttcgtgggcgagcccaagtccaaggacatcctgaagctgcggctgtacgagcagcagcacggcaagtgcctgtactccggcaaggagatcaacctggtgcggctgaacgagaagggctacgtggagatcgaccacgccctgcccttctcccggacctgggacgactccttcaacaacaaggtgctggtgctgggctccgagaaccagaacaagggcaaccagaccccctacgagtacttcaacggcaaggacaactcccgggagtggcaggagttcaaggcccgggtggagacctcccggttcccccggtccaagaagcagcggatcctgctgcagaagttcgacgaggacggcttcaaggagtgcaacctgaacgacacccggtacgtgaaccggttcctgtgccagttcgtggccgaccacatcctgctgaccggcaagggcaagcggcgggtgttcgcctccaacggccagatcaccaacctgctgcggggcttctggggcctgcggaaggtgcgggccgagaacgaccggcaccacgccctggacgccgtggtggtggcctgctccaccgtggccatgcagcagaagatcacccggttcgtgcggtacaaggagatgaacgccttcgacggcaagaccatcgacaaggagaccggcaaggtgctgcaccagaagacccacttcccccagccctgggagttcttcgcccaggaggtgatgatccgggtgttcggcaagcccgacggcaagcccgagttcgaggaggccgacacccccgagaagctgcggaccctgctggccgagaagctgtcctcccggcccgaggccgtgcacgagtacgtgacccccctgttcgtgtcccgggcccccaaccggaagatgtccggcgcccacaaggacaccctgcggtccgccaagcggttcgtgaagcacaacgagaagatctccgtgaagcgggtgtggctgaccgagatcaagctggccgacctggagaacatggtgaactacaagaacggccgggagatcgagctgtacgaggccctgaaggcccggctggaggcctacggcggcaacgccaagcaggccttcgaccccaaggacaaccccttctacaagaagggcggccagctggtgaaggccgtgcgggtggagaagacccaggagtccggcgtgctgctgaacaagaagaacgcctacaccatcgccgacaacggcgacatggtgcgggtggacgtgttctgcaaggtggacaagaagggcaagaaccagtacttcatcgtgcccatctacgcctggcaggtggccgagaacatcctgcccgacatcgactgcaagggctaccggatcgacgactcctacaccttctgcttctccctgcacaagtacgacctgatcgccttccagaaggacgagaagtccaaggtggagttcgcctactacatcaactgcgactcctccaacggccggttctacctggcctggcacgacaagggctccaaggagcagcagttccggatctccacccagaacctggtgctgatccagaagtaccaggtgaacgagctgggcaaggagatccggccctgccggctgaagaagcggccccccgtgcggtag

SEQ ID NO: 714 - RNA, 3312 nt, synthetic construct
  misc_feature 1..3312: note = Synthetic
  source 1..3312: mol_type = other RNA
atggcagcattcaagccgaactcgatcaactacatcctgggactggacatcggaatcgcatcggtcggatgggcaatggtcgaaatcgacgaagaagaaaacccgatcagactgatcgacctgggagtcagagtcttcgaaagagcagaagtcccgaagacaggagactcgctggcaatggcaagaagactggcaagatcggtcagaagactgacaagaagaagagcacacagactgctgagaacaagaagactgctgaagagagaaggagtcctgcaggcagcaaacttcgacgaaaacggactgatcaagtcgctgccgaacacaccgtggcagctgagagcagcagcactggacagaaagctgacaccgctggaatggtcggcagtcctgctgcacctgatcaagcacagaggatacctgtcgcagagaaagaacgaaggagaaacagcagacaaggaactgggagcactgctgaagggagtcgcaggaaacgcacacgcactgcagacaggagacttcagaacaccggcagaactggcactgaacaagttcgaaaaggaatcgggacacatcagaaaccagagatcggactactcgcacacattctcgagaaaggacctgcaggcagaactgatcctgctgttcgaaaagcagaaggaattcggaaacccgcacgtctcgggaggactgaaggaaggaatcgaaacactgctgatgacacagagaccggcactgtcgggagacgcagtccagaagatgctgggacactgcacattcgaaccggcagaaccgaaggcagcaaagaacacatacacagcagaaagattcatctggctgacaaagctgaacaacctgagaatcctggaacagggatcggaaagaccgctgacagacacagaaagagcaacactgatggacgaaccgtacagaaagtcgaagctgacatacgcacaggcaagaaagctgctgggactggaagacacagcattcttcaagggactgagatacggaaaggacaacgcagaagcatcgacactgatggaaatgaaggcataccacgcaatctcgagagcactggaaaaggaaggactgaaggacaagaagtcgccgctgaacctgtcgccggaactgcaggacgaaatcggaacagcattctcgctgttcaagacagacgaagacatcacaggaagactgaaggacagaatccagccggaaatcctggaagcactgctgaagcacatctcgttcgacaagttcgtccagatctcgctgaaggcactgagaagaatcgtcccgctgatggaacagggaaagagatacgacgaagcatgcgcagaaatctacggagaccactacggaaagaagaacacagaagaaaagatctacctgccgccgatcccggcagacgaaatcagaaacccggtcgtcctgagagcactgtcgcaggcaagaaaggtcatcaacggagtcgtcagaagatacggatcgccggcaagaatccacatcgaaacagcaagagaagtcggaaagtcgttcaaggacagaaaggaaatcgaaaagagacaggaagaaaacagaaaggacagagaaaaggcagcagcaaagttcagagaatacttcccgaacttcgtcggagaaccgaagtcgaaggacatcctgaagctgagactgtacgaacagcagcacggaaagtgcctgtactcgggaaaggaaatcaacctgggaagactgaacgaaaagggatacgtcgaaatcgaccacgcactgccgttctcgagaacatgggacgactcgttcaacaacaaggtcctggtcctgggatcggaaaaccagaacaagggaaaccagacaccgtacgaatacttcaacggaaaggacaactcgagagaatggcaggaattcaaggcaagagtcgaaacatcgagattcccgagatcgaagaagcagagaatcctgctgcagaagttcgacgaagacggattcaaggaaagaaacctgaacgacacaagatacgtcaacagattcctgtgccagttcgtcgcagacagaatgagactgacaggaaagggaaagaagagagtcttcgcatcgaacggacagatcacaaacctgctgagaggattctggggactgagaaaggtcagagcagaaaacgacagacaccacgcactggacgcagtcgtcgtcgcatgctcgacagtcgcaatgcagcagaagatcacaagattcgtcagatacaaggaaatgaacgcattcgacggaaagacaatcgacaaggaaacaggagaagtcctgcaccagaagacacacttcccgcagccgtgggaattcttcgcacaggaagtcatgatcagagtcttcggaaagccggacggaaagccggaattcgaagaagcagacacactggaaaagctgagaacactgctggcagaaaagctgtcgtcgagaccggaagcagtccacgaatacgtcacaccgctgttcgtctcgagagcaccgaacagaaagatgtcgggacagggacacatggaaacagtcaagtcggcaaagagactggacgaaggagtctcggtcctgagagtcccgctgacacagctgaagctgaaggacctggaaaagatggtcaacagagaaagagaaccgaagctgtacgaagcactgaaggcaagactggaagcacacaaggacgacccggcaaaggcattcgcagaaccgttctacaagtacgacaaggcaggaaacagaacacagcaggtcaaggcagtcagagtcgaacaggtccagaagacaggagtctgggtcagaaaccacaacggaatcgcagacaacgcaacaatggtcagagtagacgtcttcgaaaagggagacaagtactacctggtcccgatctactcgtggcaggtcgcaaagggaatcctgccggacagagcagtcgtccagggaaaggacgaagaagactggcagctgatcgacgactcgttcaacttcaagttctcgctgcacccgaacgacctggtcgaagtcatcacaaagaaggcaagaatgttcggatacttcgcatcgtgccacagaggaacaggaaacatcaacatcagaatccacgacctggaccacaagatcggaaagaacggaatcctggaaggaatcggagtcaagacagcactgtcgttccagaagtaccagatcgacgaactgggaaaggaaatcagaccgtgcagactgaagaagagaccgccggtcagatccggaaagagaacagcagacggatcggaattcgaatcgccgaagaagaagagaaaggtcgaatga

SEQ ID NO: 715 - RNA, 3420 nt, synthetic construct
  misc_feature 1..3420: note = Synthetic
  source 1..3420: mol_type = other RNA
atggacggctccggcggcggctcccccaagaagaagcggaaggtggaggacaagcggcccgccgccaccaagaaggccggccaggccaagaagaagaagggcggctccggcggcggcgccgccttcaagcccaaccccatcaactacatcctgggcctggacatcggcatcgcctccgtgggctgggccatggtggagatcgacgaggaggagaaccccatccggctgatcgacctgggcgtgcgggtgttcgagcgggccgaggtgcccaagaccggcgactccctggccatggcccggcggctggcccggtccgtgcggcggctgacccggcggcgggcccaccggctgctgcgggcccggcggctgctgaagcgggagggcgtgctgcaggccgccgacttcgacgagaacggcctgatcaagtccctgcccaacaccccctggcagctgcgggccgccgccctggaccggaagctgacccccctggagtggtccgccgtgctgctgcacctgatcaagcaccggggctacctgtcccagcggaagaacgagggcgagaccgccgacaaggagctgggcgccctgctgaagggcgtggccaacaacgcccacgccctgcagaccggcgacttccggacccccgccgagctggccctgaacaagttcgagaaggagtccggccacatccggaaccagcggggcgactactcccacaccttctcccggaaggacctgcaggccgagctgatcctgctgttcgagaagcagaaggagttcggcaacccccacgtgtccggcggcctgaaggagggcatcgagaccctgctgatgacccagcggcccgccctgtccggcgacgccgtgcagaagatgctgggccactgcaccttcgagcccgccgagcccaaggccgccaagaacacctacaccgccgagcggttcatctggctgaccaagctgaacaacctgcggatcctggagcagggctccgagcggcccctgaccgacaccgagcgggccaccctgatggacgagccctaccggaagtccaagctgacctacgcccaggcccggaagctgctgggcctggaggacaccgccttcttcaagggcctgcggtacggcaaggacaacgccgaggcctccaccctgatggagatgaaggcctaccacgccatctcccgggccctggagaaggagggcctgaaggacaagaagtcccccctgaacctgtcctccgagctgcaggacgagatcggcaccgccttctccctgttcaagaccgacgaggacatcaccggccggctgaaggaccgggtgcagcccgagatcctggaggccctgctgaagcacatctccttcgacaagttcgtgcagatctccctgaaggccctgcggcggatcgtgcccctgatggagcagggcaagcggtacgacgaggcctgcgccgagatctacggcgaccactacggcaagaagaacaccgaggagaagatctacctgccccccatccccgccgacgagatccggaaccccgtggtgctgcgggccctgtcccaggcccggaaggtgatcaacggcgtggtgcggcggtacggctcccccgcccggatccacatcgagaccgcccgggaggtgggcaagtccttcaaggaccggaaggagatcgagaagcggcaggaggagaaccggaaggaccgggagaaggccgccgccaagttccgggagtacttccccaacttcgtgggcgagcccaagtccaaggacatcctgaagctgcggctgtacgagcagcagcacggcaagtgcctgtactccggcaaggagatcaacctggtgcggctgaacgagaagggctacgtggagatcgaccacgccctgcccttctcccggacctgggacgactccttcaacaacaaggtgctggtgctgggctccgagaaccagaacaagggcaaccagaccccctacgagtacttcaacggcaaggacaactcccgggagtggcaggagttcaaggcccgggtggagacctcccggttcccccggtccaagaagcagcggatcctgctgcagaagttcgacgaggacggcttcaaggagtgcaacctgaacgacacccggtacgtgaaccggttcctgtgccagttcgtggccgaccacatcctgctgaccggcaagggcaagcggcgggtgttcgcctccaacggccagatcaccaacctgctgcggggcttctggggcctgcggaaggtgcgggccgagaacgaccggcaccacgccctggacgccgtggtggtggcctgctccaccgtggccatgcagcagaagatcacccggttcgtgcggtacaaggagatgaacgccttcgacggcaagaccatcgacaaggagaccggcaaggtgctgcaccagaagacccacttcccccagccctgggagttcttcgcccaggaggtgatgatccgggtgttcggcaagcccgacggcaagcccgagttcgaggaggccgacacccccgagaagctgcggaccctgctggccgagaagctgtcctcccggcccgaggccgtgcacgagtacgtgacccccctgttcgtgtcccgggcccccaaccggaagatgtccggcgcccacaaggacaccctgcggtccgccaagcggttcgtgaagcacaacgagaagatctccgtgaagcgggtgtggctgaccgagatcaagctggccgacctggagaacatggtgaactacaagaacggccgggagatcgagctgtacgaggccctgaaggcccggctggaggcctacggcggcaacgccaagcaggccttcgaccccaaggacaaccccttctacaagaagggcggccagctggtgaaggccgtgcgggtggagaagacccaggagtccggcgtgctgctgaacaagaagaacgcctacaccatcgccgacaacggcgacatggtgcgggtggacgtgttctgcaaggtggacaagaagggcaagaaccagtacttcatcgtgcccatctacgcctggcaggtggccgagaacatcctgcccgacatcgactgcaagggctaccggatcgacgactcctacaccttctgcttctccctgcacaagtacgacctgatcgccttccagaaggacgagaagtccaaggtggagttcgcctactacatcaactgcgactcctccaacggccggttctacctggcctggcacgacaagggctccaaggagcagcagttccggatctccacccagaacctggtgctgatccagaagtaccaggtgaacgagctgggcaaggagatccggccctgccggctgaagaagcggccccccgtgcggtccgagtccgccacccccgagtccgtgtccggctggcggctgttcaagaagatctcctag

SEQ ID NO: 716 - RNA, 3420 nt, synthetic construct
  misc_feature 1..3420: note = Synthetic
  source 1..3420: mol_type = other RNA
atggacggctccggcggcggctcccccaagaagaagcggaaggtggaggacaagcggcccgccgccaccaagaaggccggccaggccaagaagaagaagggcggctccggcggcggcgcagcattcaagccaaactcaatcaattacatcctgggactggacatcggcatcgcatccgtcgggtgggctatggtcgaaatcgacgaggaggagaaccccatccgcctgatcgatctgggcgtgcgcgtgtttgagagggcagaggtgcctaagaccggcgacagcctggccatggcacggagactggcacgctccgtgaggcgcctgacccggagaagggcccacagactgctgaggacacgccggctgctgaagagggagggcgtgctgcaggccgccaacttcgatgagaatggcctgatcaagtccctgcccaataccccttggcagctgagggcagccgccctggaccgcaagctgacacctctggagtggtccgccgtgctgctgcacctgatcaagcaccggggctacctgtctcagagaaagaacgagggcgagacagccgataaggagctgggcgccctgctgaagggagtggcaggaaatgcacacgccctgcagaccggcgactttcgcacaccagccgagctggccctgaacaagttcgagaaggagagcggccacatccgcaatcagcggtctgactatagccacaccttctcccggaaggatctgcaggccgagctgatcctgctgtttgagaagcagaaggagttcggcaacccacacgtgtctggcggcctgaaggagggcatcgagacactgctgatgacacagcggcccgccctgagcggcgacgcagtgcagaagatgctgggacactgcacctttgagccagccgagcccaaggccgccaagaatacctacacagccgagcggttcatctggctgacaaagctgaacaatctgaggatcctggagcagggaagcgagcgcccactgaccgacacagagagggccaccctgatggatgagccctaccgcaagtccaagctgacatatgcacaggcaaggaagctgctgggcctggaggacaccgccttctttaagggcctgagatacggcaaggataacgccgaggcctctacactgatggagatgaaggcctatcacgccatcagcagggccctggagaaggagggcctgaaggacaagaagtccccactgaatctgtctcccgagctgcaggatgagatcggcaccgcctttagcctgttcaagaccgacgaggatatcacaggcagactgaaggacaggatccagccagagatcctggaggccctgctgaagcacatcagctttgataagttcgtgcagatcagcctgaaggccctgcggaggatcgtgccactgatggagcagggcaagaggtacgacgaggcctgcgccgaaatctacggcgatcactatggcaagaagaacacagaggagaaaatctacctgccccctatccccgccgatgagatcaggaaccctgtggtgctgcgcgccctgtctcaggcaagaaaagtgatcaacggagtggtgcgccggtacggcagccccgccagaatccacatcgagacagccagggaagtgggcaagtcctttaaggacagaaaggagatcgagaagaggcaggaggagaacagaaaggatagggagaaggccgccgccaagttcagagagtactttcctaatttcgtgggcgagccaaagtccaaggatatcctgaagctgaggctgtacgagcagcagcacggcaagtgtctgtattctggcaaggagatcaacctgggccgcctgaatgagaagggctatgtggagatcgaccacgccctgcctttttctcggacctgggacgatagcttcaacaataaggtgctggtgctgggctctgagaaccagaataagggcaaccagacaccctacgagtatttcaacggcaaggacaatagccgcgagtggcaggagtttaaggcaagggtggagacaagcaggttccctcggtccaagaagcagagaatcctgctgcagaagtttgacgaggatggcttcaaggagaggaacctgaatgacacccgctacgtgaatcggtttctgtgccagttcgtggccgatagaatgaggctgaccggcaagggcaagaagagagtgtttgcctccaacggccagatcacaaatctgctgaggggcttctggggcctgagaaaggtgagggcagagaacgacaggcaccacgcactggatgcagtggtggtggcatgttctaccgtggccatgcagcagaagatcacacgctttgtgcggtataaggagatgaatgccttcgacggcaagaccatcgataaggagacaggcgaggtgctgcaccagaagacacactttcctcagccatgggagttctttgcccaggaagtgatgatccgggtgtttggcaagcctgacggcaagccagagttcgaggaggccgataccctggagaagctgagaacactgctggcagagaagctgagctccaggcccgaggcagtgcacgagtacgtgaccccactgttcgtgtctagagcccccaacaggaagatgagcggccagggccacatggagacagtgaagtccgccaagagactggacgagggcgtgtctgtgctgagggtgcctctgacacagctgaagctgaaggatctggagaagatggtgaatcgcgagcgggagccaaagctgtatgaggccctgaaggcaaggctggaggcacacaaggacgatcctgccaaggcctttgccgagccattctacaagtatgataaggccggcaacagaacccagcaggtgaaggccgtgagggtggagcaggtgcagaagacaggcgtgtgggtgcgcaaccacaatggcatcgccgacaatgctaccatggtgcgggtggacgtgtttgagaagggcgataagtactatctggtgcccatctacagctggcaggtggccaagggcatcctgcctgatagagccgtggtgcagggcaaggacgaggaggattggcagctgatcgacgattccttcaactttaagttctctctgcaccccaatgacctggtggaagtgatcaccaagaaggccaggatgtttggctacttcgcctcctgccaccgcggcacaggcaacatcaatatccggatccacgacctggatcacaagatcggcaagaacggcatcctggagggcatcggcgtgaagacagccctgagcttccagaagtatcagatcgacgagctgggcaaggagatcagaccttgtaggctgaagaagcgcccacccgtgcggtccgagtccgccacccccgagtccgtgtccggctggcggctgttcaagaagatctcctag

SEQ ID NO: 717 - RNA, 3420 nt, synthetic construct
  misc_feature 1..3420: note = Synthetic
  source 1..3420: mol_type = other RNA
atggacggctccggcggcggctcccccaagaagaagcggaaggtggaggacaagcggcccgccgccaccaagaaggccggccaggccaagaagaagaagggcggctccggcggcggcgccgccttcaagcccaactccatcaactacatcctgggcctggacatcggcatcgcctccgtgggctgggccatggtggagatcgacgaggaggagaaccccatccggctgatcgacctgggcgtgcgggtgttcgagcgggccgaggtgcccaagaccggcgactccctggccatggcccggcggctggcccggtccgtgcggcggctgacccggcggcgggcccaccggctgctgcggacccggcggctgctgaagcgggagggcgtgctgcaggccgccaacttcgacgagaacggcctgatcaagtccctgcccaacaccccctggcagctgcgggccgccgccctggaccggaagctgacccccctggagtggtccgccgtgctgctgcacctgatcaagcaccggggctacctgtcccagcggaagaacgagggcgagaccgccgacaaggagctgggcgccctgctgaagggcgtggccggcaacgcccacgccctgcagaccggcgacttccggacccccgccgagctggccctgaacaagttcgagaaggagtccggccacatccggaaccagcggtccgactactcccacaccttctcccggaaggacctgcaggccgagctgatcctgctgttcgagaagcagaaggagttcggcaacccccacgtgtccggcggcctgaaggagggcatcgagaccctgctgatgacccagcggcccgccctgtccggcgacgccgtgcagaagatgctgggccactgcaccttcgagcccgccgagcccaaggccgccaagaacacctacaccgccgagcggttcatctggctgaccaagctgaacaacctgcggatcctggagcagggctccgagcggcccctgaccgacaccgagcgggccaccctgatggacgagccctaccggaagtccaagctgacctacgcccaggcccggaagctgctgggcctggaggacaccgccttcttcaagggcctgcggtacggcaaggacaacgccgaggcctccaccctgatggagatgaaggcctaccacgccatctcccgggccctggagaaggagggcctgaaggacaagaagtcccccctgaacctgtcccccgagctgcaggacgagatcggcaccgccttctccctgttcaagaccgacgaggacatcaccggccggctgaaggaccggatccagcccgagatcctggaggccctgctgaagcacatctccttcgacaagttcgtgcagatctccctgaaggccctgcggcggatcgtgcccctgatggagcagggcaagcggtacgacgaggcctgcgccgagatctacggcgaccactacggcaagaagaacaccgaggagaagatctacctgccccccatccccgccgacgagatccggaaccccgtggtgctgcgggccctgtcccaggcccggaaggtgatcaacggcgtggtgcggcggtacggctcccccgcccggatccacatcgagaccgcccgggaggtgggcaagtccttcaaggaccggaaggagatcgagaagcggcaggaggagaaccggaaggaccgggagaaggccgccgccaagttccgggagtacttccccaacttcgtgggcgagcccaagtccaaggacatcctgaagctgcggctgtacgagcagcagcacggcaagtgcctgtactccggcaaggagatcaacctgggccggctgaacgagaagggctacgtggagatcgaccacgccctgcccttctcccggacctgggacgactccttcaacaacaaggtgctggtgctgggctccgagaaccagaacaagggcaaccagaccccctacgagtacttcaacggcaaggacaactcccgggagtggcaggagttcaaggcccgggtggagacctcccggttcccccggtccaagaagcagcggatcctgctgcagaagttcgacgaggacggcttcaaggagcggaacctgaacgacacccggtacgtgaaccggttcctgtgccagttcgtggccgaccggatgcggctgaccggcaagggcaagaagcgggtgttcgcctccaacggccagatcaccaacctgctgcggggcttctggggcctgcggaaggtgcgggccgagaacgaccggcaccacgccctggacgccgtggtggtggcctgctccaccgtggccatgcagcagaagatcacccggttcgtgcggtacaaggagatgaacgccttcgacggcaagaccatcgacaaggagaccggcgaggtgctgcaccagaagacccacttcccccagccctgggagttcttcgcccaggaggtgatgatccgggtgttcggcaagcccgacggcaagcccgagttcgaggaggccgacaccctggagaagctgcggaccctgctggccgagaagctgtcctcccggcccgaggccgtgcacgagtacgtgacccccctgttcgtgtcccgggcccccaaccggaagatgtccggccagggccacatggagaccgtgaagtccgccaagcggctggacgagggcgtgtccgtgctgcgggtgcccctgacccagctgaagctgaaggacctggagaagatggtgaaccgggagcgggagcccaagctgtacgaggccctgaaggcccggctggaggcccacaaggacgaccccgccaaggccttcgccgagcccttctacaagtacgacaaggccggcaaccggacccagcaggtgaaggccgtgcgggtggagcaggtgcagaagaccggcgtgtgggtgcggaaccacaacggcatcgccgacaacgccaccatggtgcgggtggacgtgttcgagaagggcgacaagtactacctggtgcccatctactcctggcaggtggccaagggcatcctgcccgaccgggccgtggtgcagggcaaggacgaggaggactggcagctgatcgacgactccttcaacttcaagttctccctgcaccccaacgacctggtggaggtgatcaccaagaaggcccggatgttcggctacttcgcctcctgccaccggggcaccggcaacatcaacatccggatccacgacctggaccacaagatcggcaagaacggcatcctggagggcatcggcgtgaagaccgccctgtccttccagaagtaccagatcgacgagctgggcaaggagatccggccctgccggctgaagaagcggccccccgtgcggtccgagtccgccacccccgagtccgtgtccggctggcggctgttcaagaagatctcctag

SEQ ID NO: 718 - RNA, 3414 nt, synthetic construct
  misc_feature 1..3414: note = Synthetic
  source 1..3414: mol_type = other RNA
atggacggctccggcggcggctcccccaagaagaagcggaaggtggaggacaagcggcccgccgccaccaagaaggccggccaggccaagaagaagaagggcggctccggcggcgccgccttcaagcccaaccccatcaactacatcctgggcctggacatcggcatcgcctccgtgggctgggccatggtggagatcgacgaggaggagaaccccatccggctgatcgacctgggcgtgcgggtgttcgagcgggccgaggtgcccaagaccggcgactccctggccatggcccggcggctggcccggtccgtgcggcggctgacccggcggcgggcccaccggctgctgcgggcccggcggctgctgaagcgggagggcgtgctgcaggccgccgacttcgacgagaacggcctgatcaagtccctgcccaacaccccctggcagctgcgggccgccgccctggaccggaagctgacccccctggagtggtccgccgtgctgctgcacctgatcaagcaccggggctacctgtcccagcggaagaacgagggcgagaccgccgacaaggagctgggcgccctgctgaagggcgtggccgacaacgcccacgccctgcagaccggcgacttccggacccccgccgagctggccctgaacaagttcgagaaggagtgcggccacatccggaaccagcggggcgactactcccacaccttctcccggaaggacctgcaggccgagctgaacctgctgttcgagaagcagaaggagttcggcaacccccacgtgtccggcggcctgaaggagggcatcgagaccctgctgatgacccagcggcccgccctgtccggcgacgccgtgcagaagatgctgggccactgcaccttcgagcccgccgagcccaaggccgccaagaacacctacaccgccgagcggttcatctggctgaccaagctgaacaacctgcggatcctggagcagggctccgagcggcccctgaccgacaccgagcgggccaccctgatggacgagccctaccggaagtccaagctgacctacgcccaggcccggaagctgctgtccctggaggacaccgccttcttcaagggcctgcggtacggcaaggacaacgccgaggcctccaccctgatggagatgaaggcctaccacaccatctcccgggccctggagaaggagggcctgaaggacaagaagtcccccctgaacctgtcccccgagctgcaggacgagatcggcaccgccttctccctgttcaagaccgacgaggacatcaccggccggctgaaggaccggatccagcccgagatcctggaggccctgctgaagcacatctccttcgacaagttcgtgcagatctccctgaaggccctgcggcggatcgtgcccctgatggagcagggcaagcggtacgacgaggcctgcgccgagatctacggcgaccactacggcaagaagaacaccgaggagaagatctacctgccccccatccccgccgacgagatccggaaccccgtggtgctgcgggccctgtcccaggcccggaaggtgatcaacggcgtggtgcggcggtacggctcccccgcccggatccacatcgagaccgcccgggaggtgggcaagtccttcaaggaccggaaggagatcgagaagcggcaggaggagaaccggaaggaccgggagaaggccgccgccaagttccgggagtacttccccaacttcgtgggcgagcccaagtccaaggacatcctgaagctgcggctgtacgagcagcagcacggcaagtgcctgtactccggcaaggagatcaacctgggccggctgaacgagaagggctacgtggagatcgaccacgccctgcccttctcccggacctgggacgactccttcaacaacaaggtgctggtgctgggctccgagaaccagaacaagggcaaccagaccccctacgagtacttcaacggcaaggacaactcccgggagtggcaggagttcaaggcccgggtggagacctcccggttcccccggtccaagaagcagcggatcctgctgcagaagttcgacgaggacggcttcaaggagcggaacctgaacgacacccggtacgtgaaccggttcctgtgccagttcgtggccgaccggatgcggctgaccggcaagggcaagaagcgggtgttcgcctccaacggccagatcaccaacctgctgcggggcttctggggcctgcggaaggtgcgggccgagaacgaccggcaccacgccctggacgccgtggtggtggcctgctccaccgtggccatgcagcagaagatcacccggttcgtgcggtacaaggagatgaacgccttcgacggcaagaccatcgacaaggagaccggcgaggtgctgcaccagaagacccacttcccccagccctgggagttcttcgcccaggaggtgatgatccgggtgttcggcaagcccgacggcaagcccgagttcgaggaggccgacacccccgagaagctgcggaccctgctggccgagaagctgtcctcccggcccgaggccgtgcacgagtacgtgacccccctgttcgtgtcccgggcccccaaccggaagatgtccggccagggccacatggagaccgtgaagtccgccaagcggctggacgagggcgtgtccgtgctgcgggtgcccctgacccagctgaagctgaaggacctggagaagatggtgaaccgggagcgggagcccaagctgtacgaggccctgaaggcccggctggaggcccacaaggacgaccccgccaaggccttcgccgagcccttctacaagtacgacaaggccggcaaccggacccagcaggtgaaggccgtgcgggtggagcaggtgcagaagaccggcgtgtgggtgcggaaccacaacggcatcgccgacaacgccaccatggtgcgggtggacgtgttcgagaagggcgacaagtactacctggtgcccatctactcctggcaggtggccaagggcatcctgcccgaccgggccgtggtggcctacgccgacgaggaggactggaccgtgatcgacgagtccttccggttcaagttcgtgctgtactccaacgacctgatcaaggtgcagctgaagaaggactccttcctgggctacttctccggcctggaccgggccaccggcgccatctccctgcgggagcacgacctggagaagtccaagggcaaggacggcatgcaccggatcggcgtgaagaccgccctgtccttccagaagtaccagatcgacgagatgggcaaggagatccggccctgccggctgaagaagcggccccccgtgcggtccgagtccgccacccccgagtccgtgtccggctggcggctgttcaagaagatctcctag

SEQ ID NO: 719-757 - skipped (39 entries)

SEQ ID NO: 758 - RNA, 100 nt, synthetic construct
  misc_feature 1..100: note = Synthetic
  source 1..100: mol_type = other RNA
acacaaataccagtccagcggttttagagctagaaatagcaagttaaaataaggctagtccgttatcaacttgaaaaagtggcaccgagtcggtgctttt

SEQ ID NO: 759 - RNA, 100 nt, synthetic construct; identical to SEQ ID NO: 758
  misc_feature 1..100: note = Synthetic
  misc_feature 1..100: note = See specification as filed for detailed description of substitutions and modifications
  source 1..100: mol_type = other RNA

SEQ ID NO: 760 - DNA, 145 bp, synthetic construct
  misc_feature 1..145: note = Synthetic
  source 1..145: mol_type = other DNA
ggcgcttcgccagccattcctgcgttgtagctccctttctcatttcggaaacgaaatgagaaccgttgctacaataaggccgtctgaaaagatgtgccgcaacgctctgccccttaaagcttctgctttaaggggcatcgtttat

SEQ ID NO: 761 - DNA, 101 bp, synthetic construct
  misc_feature 1..101: note = Synthetic
  source 1..101: mol_type = other DNA
ggcgcttcgccagccattcctgcgttgtagccttctgaaaagaaggctacaataaggccgtctgaaaagatgtgccgcaacgctctgcttctgcatcgttt

SEQ ID NO: 762 - DNA, 105 bp, synthetic construct
  misc_feature 1..105: note = Synthetic
  source 1..105: mol_type = other DNA
ggcgcttcgccagccattcctgcgttgtagctccctctgaaaagccgttgctacaataaggccgtctgaaaagatgtgccgcaacgctctgcttctgcatcgttt

SEQ ID NO: 763 - DNA, 105 bp, synthetic construct
  misc_feature 1..105: note = Synthetic
  source 1..105: mol_type = other DNA
ggcgcttcgccagccattcctgcgttgtagctccctttctgaaaagaaccgttgctacaataaggccgtctgaaaagatgtgccgcaacgctctgcttctgcatt

SEQ ID NO: 764 - DNA, 109 bp, synthetic construct
  misc_feature 1..109: note = Synthetic
  source 1..109: mol_type = other DNA
ggcgcttcgccagccattcctgcgttgtagctccctttctgaaaagaaccgttgctacaataaggccgtctgaaaagatgtgccgcaacgctctgcttctgcatcgttt

SEQ ID NO: 765 - DNA, 109 bp, synthetic construct
  misc_feature 1..109: note = Synthetic
  source 1..109: mol_type = other DNA
ggcgcttcgccagccattcctgcgttgtagccttctcattgaaaaatgagaaggctacaataaggccgtctgaaaagatgtgccgcaacgctctgcttctgcatcgttt

SEQ ID NO: 766 - DNA, 111 bp, synthetic construct
  misc_feature 1..111: note = Synthetic
  source 1..111: mol_type = other DNA
ggcgcttcgccagccattcctgcgttgtagctccctctgaaaagccgttgctacaataaggccgtctgaaaagatgtgccgcaacgctctgccccttttctaaggggcatt

SEQ ID NO: 767 - DNA, 115 bp, synthetic construct
  misc_feature 1..115: note = Synthetic
  source 1..115: mol_type = other DNA
ggcgcttcgccagccattcctgcgttgtagctccctttctgaaaagaaccgttgctacaataaggccgtctgaaaagatgtgccgcaacgctctgccccttttctaaggggcatt

SEQ ID NO: 768 - DNA, 122 bp, synthetic construct
  misc_feature 1..122: note = Synthetic
  source 1..122: mol_type = other DNA
ggggcgcttcgccagccattcctgcgttgtagctccctttctcaggaaactgagaaccgttgctacaataaggccgtctgaaaagatgtgccgcaacgctctgccccttttctaaggggcat

SEQ ID NO: 769 - DNA, 125 bp, synthetic construct
  misc_feature 1..125: note = Synthetic
  source 1..125: mol_type = other DNA
ggcgcttcgccagccattcctgcgttgtagctcccttctcaggaaactgagaaccgttgctacaataaggccgtctgaaaagatgtgccgcaacgctctgccccttttctaaggggcatcgtttt

SEQ ID NO: 770 - DNA, 100 bp, synthetic construct
  misc_feature 1..100: note = Synthetic
  source 1..100: mol_type = other DNA
ggcgcttcgccagccattcctgcgttgtagctccctgaaaccgttgctacaataaggccgtgaaaatgtgccgcaacgctctgccttctggcatcgtttt

SEQ ID NO: 771 - DNA, 102 bp, synthetic construct
  misc_feature 1..102: note = Synthetic
  source 1..102: mol_type = other DNA
ggcgcttcgccagccattcctgcgttgtagctccctgaaaccgttgctacaataaggccgtcgaaagatgtgccgcaacgctctgccttctggcatcgtttt

SEQ ID NO: 772 - DNA, 104 bp, synthetic construct
  misc_feature 1..104: note = Synthetic
  source 1..104: mol_type = other DNA
ggcgcttcgccagccattcctgcgttgtagctccctgaaaccgttgctacaataaggccgtgaaaatgtgccgcaacgctctgccgcttctgcggcatcgtttt

SEQ ID NO: 773 - DNA, 104 bp, synthetic construct
  misc_feature 1..104: note = Synthetic
  source 1..104: mol_type = other DNA
ggcgcttcgccagccattcctgcgttgtagctccctgaaaccgttgctacaataaggccgtctgaaaagatgtgccgcaacgctctgccttctggcatcgtttt

SEQ ID NO: 774 - DNA, 106 bp, synthetic construct
  misc_feature 1..106: note = Synthetic
  source 1..106: mol_type = other DNA
ggcgcttcgccagccattcctgcgttgtagctcccttcggaaacgaccgttgctacaataaggccgtgaaaatgtgccgcaacgctctgccttctggcatcgtttt

SEQ ID NO: 775 - DNA, 108 bp, synthetic construct
  misc_feature 1..108: note = Synthetic
  source 1..108: mol_type = other DNA
ggcgcttcgccagccattcctgcgttgtagctccctgaaaccgttgctacaataaggccgtctgaaaagatgtgccgcaacgctctgccgcttctgcggcatcgtttt

SEQ ID NO: 776 - DNA, 110 bp, synthetic construct
  misc_feature 1..110: note = Synthetic
  source 1..110: mol_type = other DNA
ggcgcttcgccagccattcctgcgttgtagctcccttcggaaacgaccgttgctacaataaggccgtctgaaaagatgtgccgcaacgctctgccttctggcatcgtttt

SEQ ID NO: 777 - DNA, 112 bp, synthetic construct
  misc_feature 1..112: note = Synthetic
  source 1..112: mol_type = other DNA
ggcgcttcgccagccattcctgcgttgtagctcccttcggaaacgaccgttgctacaataaggccgtgaaaatgtgccgcaacgctctgccgcttctgcggcatcgtttttt

SEQ ID NO: 778 - DNA, 114 bp, synthetic construct
  misc_feature 1..114: note = Synthetic
  source 1..114: mol_type = other DNA
ggcgcttcgccagccattcctgcgttgtagctcccttcggaaacgaccgttgctacaataaggccgtctgaaaagatgtgccgcaacgctctgccgcttctgcggcatcgtttt

SEQ ID NO: 779 - DNA, 110 bp, synthetic construct
  misc_feature 1..110: note = Synthetic
  source 1..110: mol_type = other DNA
ggcgcttcgccagccattcctgcgttgtagctcccttggaaacaccgttgctacaataaggccgttgaaaaatgtgccgcaacgctctgcccttctgggcatcgtttttt

SEQ ID NO: 780 - DNA, 108 bp, synthetic construct
  misc_feature 1..108: note = Synthetic
  source 1..108: mol_type = other DNA
ggcgcttcgccagccattcctgcgttgtagctcccttggaaacaccgttgctacaataaggccgtcgaaagatgtgccgcaacgctctgcccttctgggcatcgtttt

SEQ ID NO: 781 - DNA, 112 bp, synthetic construct
  misc_feature 1..112: note = Synthetic
  source 1..112: mol_type = other DNA
ggcgcttcgccagccattcctgcgttgtagctcccttggaaacaccgttgctacaataaggccgtctgaaaagatgtgccgcaacgctctgccgcttctgcggcatcgtttt

SEQ ID NO: 782 - DNA, 112 bp, synthetic construct
  misc_feature 1..112: note = Synthetic
  source 1..112: mol_type = other DNA
ggcgcttcgccagccattcctgcgttgtagctcccttcggaaacgaccgttgctacaataaggccgtctgaaaagatgtgccgcaacgctctgccgttctcggcatcgtttt

SEQ ID NO: 783 - DNA, 112 bp, synthetic construct
  misc_feature 1..112: note = Synthetic
  source 1..112: mol_type = other DNA
ggcgcttcgccagccattcctgcgttgtagctcccttcggaaacgaccgttgctacaataaggccgtctgaaaagatgtgccgcaacgctctgcccttctgggcatcgtttt

SEQ ID NO: 784 - DNA, 112 bp, synthetic construct
  misc_feature 1..112: note = Synthetic
  source 1..112: mol_type = other DNA
ggcgcttcgccagccattcctgcgttgtagctcccttcggaaacgaccgttgctacaataaggccgttgaaaaatgtgccgcaacgctctgccgcttctgcggcatcgtttt

SEQ ID NO: 785 - DNA, 112 bp, synthetic construct
  misc_feature 1..112: note = Synthetic
  source 1..112: mol_type = other DNA
ggcgcttcgccagccattcctgcgttgtagctcccttcggaaacgaccgttgctacaataaggccgtcgaaagatgtgccgcaacgctctgccgcttctgcggcatcgtttt

SEQ ID NO: 786 - DNA, 111 bp, synthetic construct
  misc_feature 1..111: note = Synthetic
  source 1..111: mol_type = other DNA
ggcgcttcgccagccattcctgcgttgtagctcccttcggaacgaccgttgctacaataaggccgtctgaaagatgtgccgcaacgctctgccgctctgcggcatcgtttt

SEQ ID NO: 787 - DNA, 98 bp, synthetic construct
  misc_feature 1..98: note = Synthetic
  source 1..98: mol_type = other DNA
ggcgcttcgccagccattcctgcgttgtagctcccgaaacgttgctacaataaggccgtctgaaaagatgtgccgcaacgctctgcttctgcatcgtt

SEQ ID NO: 788 - DNA, 123 bp, synthetic construct
  misc_feature 1..123: note = Synthetic
  source 1..123: mol_type = other DNA
ggggcgcttcgccagccattcctgcgttgtagctcccgaaacgttgctacaataaggcccgtctgaaaagatgtgccgcaacgctctgccccttaaagcttctgctttaaggggcatcgttta

SEQ ID NO: 789 - DNA, 110 bp, synthetic construct
  misc_feature 1..110: note = Synthetic
  source 1..110: mol_type = other DNA
ggcgcttcgccagccattcctgcgttgtagctcccgaaacgttgctacaataaggccgtctgaaaagatgtgccgcaacgctctgccccttttctaaggggcatcgttta

SEQ ID NO: 790 - DNA, 104 bp, synthetic construct
  misc_feature 1..104: note = Synthetic
  source 1..104: mol_type = other DNA
ggcgcttcgccagccattcctgcgttgtagctcccgaaacgttgctacaataaggccgtctgaaaagatgtgccgcaacgctctgcttctgcatcgtttatttt

SEQ ID NO: 791-799 - skipped (9 entries)

SEQ ID NO: 800 - RNA, 89 nt, synthetic construct
  misc_feature 1..89: note = Synthetic
  misc_feature 1..89: note = See specification as filed for detailed description of substitutions and modifications
  source 1..89: mol_type = other RNA
ccaagtgtcttccagtacgatttggttgtagctccctccgttgctacaataaggccgtcgatgtgccgcaacgctctgccggcatcgtt

SEQ ID NO: 801 - RNA, 89 nt, synthetic construct
  misc_feature 1..89: note = Synthetic
  misc_feature 1..89: note = See specification as filed for detailed description of substitutions and modifications
  source 1..89: mol_type = other RNA
cttcaccaggagaagccgtcacacgttgtagctccctccgttgctacaataaggccgtcgatgtgccgcaacgctctgccggcatcgtt

SEQ ID NO: 802 - RNA, 89 nt, synthetic construct
  misc_feature 1..89: note = Synthetic
  misc_feature 1..89: note = See specification as filed for detailed description of substitutions and modifications
  source 1..89: mol_type = other RNA
cttcaccaagagaagccgtcacacgttgtagctccctccgttgctacaataaggccgtcgatgtgccgcaacgctctgccggcatcgtt

SEQ ID NO: 803 - RNA, 89 nt, synthetic construct; identical to SEQ ID NO: 801
  misc_feature 1..89: note = Synthetic
  misc_feature 1..89: note = See specification as filed for detailed description of substitutions and modifications
  source 1..89: mol_type = other RNA

SEQ ID NO: 804 - RNA, 89 nt, synthetic construct; identical to SEQ ID NO: 801
  misc_feature 1..89: note = Synthetic
  misc_feature 1..89: note = See specification as filed for detailed description of substitutions and modifications
  source 1..89: mol_type = other RNA

SEQ ID NO: 805 - RNA, 89 nt, synthetic construct; identical to SEQ ID NO: 801
  misc_feature 1..89: note = Synthetic
  misc_feature 1..89: note = See specification as filed for detailed description of substitutions and modifications
  source 1..89: mol_type = other RNA

SEQ ID NO: 806 - RNA, 89 nt, synthetic construct; identical to SEQ ID NO: 801
  misc_feature 1..89: note = Synthetic
  misc_feature 1..89: note = See specification as filed for detailed description of substitutions and modifications
  source 1..89: mol_type = other RNA

SEQ ID NO: 807 - RNA, 89 nt, synthetic construct; identical to SEQ ID NO: 801
  misc_feature 1..89: note = Synthetic
  misc_feature 1..89: note = See specification as filed for detailed description of substitutions and modifications
  source 1..89: mol_type = other RNA

SEQ ID NO: 808 - RNA, 89 nt, synthetic construct; identical to SEQ ID NO: 801
  misc_feature 1..89: note = Synthetic
  misc_feature 1..89: note = See specification as filed for detailed description of substitutions and modifications
  source 1..89: mol_type = other RNA

SEQ ID NO: 809 - RNA, 89 nt, synthetic construct; identical to SEQ ID NO: 801
  misc_feature 1..89: note = Synthetic
  misc_feature 1..89: note = See specification as filed for detailed description of substitutions and modifications
  source 1..89: mol_type = other RNA

SEQ ID NO: 810 - RNA, 89 nt, synthetic construct; identical to SEQ ID NO: 801
  misc_feature 1..89: note = Synthetic
  misc_feature 1..89: note = See specification as filed for detailed description of substitutions and modifications
  source 1..89: mol_type = other RNA

SEQ ID NO: 811 - RNA, 89 nt, synthetic construct; identical to SEQ ID NO: 801
  misc_feature 1..89: note = Synthetic
  misc_feature 1..89: note = See specification as filed for detailed description of substitutions and modifications
  source 1..89: mol_type = other RNA

SEQ ID NO: 812 - RNA, 89 nt, synthetic construct; identical to SEQ ID NO: 801
  misc_feature 1..89: note = Synthetic
  misc_feature 1..89: note = See specification as filed for detailed description of substitutions and modifications
  source 1..89: mol_type = other RNA

SEQ ID NO: 813 - RNA, 89 nt, synthetic construct; identical to SEQ ID NO: 801
  misc_feature 1..89: note = Synthetic
  misc_feature 1..89: note = See specification as filed for detailed description of substitutions and modifications
  source 1..89: mol_type = other RNA

SEQ ID NO: 814 - RNA, 89 nt, synthetic construct; identical to SEQ ID NO: 801
  misc_feature 1..89: note = Synthetic
  misc_feature 1..89: note = See specification as filed for detailed description of substitutions and modifications
  source 1..89: mol_type = other RNA

SEQ ID NO: 815 - RNA, 89 nt, synthetic construct; identical to SEQ ID NO: 801
  misc_feature 1..89: note = Synthetic
  misc_feature 1..89: note = See specification as filed for detailed description of substitutions and modifications
  source 1..89: mol_type = other RNA

SEQ ID NO: 816 - RNA, 89 nt, synthetic construct; identical to SEQ ID NO: 801
  misc_feature 1..89: note = Synthetic
  misc_feature 1..89: note = See specification as filed for detailed description of substitutions and modifications
  source 1..89: mol_type = other RNA

SEQ ID NO: 817 - RNA, 89 nt, synthetic construct; identical to SEQ ID NO: 801
  misc_feature 1..89: note = Synthetic
  misc_feature 1..89: note = See specification as filed for detailed description of substitutions and modifications
  source 1..89: mol_type = other RNA

SEQ ID NO: 818 - RNA, 89 nt, synthetic construct; identical to SEQ ID NO: 801
  misc_feature 1..89: note = Synthetic
  misc_feature 1..89: note = See specification as filed for detailed description of substitutions and modifications
  source 1..89: mol_type = other RNA

SEQ ID NO: 819 - RNA, 89 nt, synthetic construct; identical to SEQ ID NO: 801
  misc_feature 1..89: note = Synthetic
  misc_feature 1..89: note = See specification as filed for detailed description of substitutions and modifications
  source 1..89: mol_type = other RNA

SEQ ID NO: 820 - RNA, 89 nt, synthetic construct; identical to SEQ ID NO: 802
  misc_feature 1..89: note = Synthetic
  misc_feature 1..89: note = See specification as filed for detailed description of substitutions and modifications
  source 1..89: mol_type = other RNA

SEQ ID NO: 821 - RNA, 89 nt, synthetic construct; identical to SEQ ID NO: 802
  misc_feature 1..89: note = Synthetic
  misc_feature 1..89: note = See specification as filed for detailed description of substitutions and modifications
  source 1..89: mol_type = other RNA

SEQ ID NO: 822 - RNA, 89 nt, synthetic construct; identical to SEQ ID NO: 802
  misc_feature 1..89: note = Synthetic
  misc_feature 1..89: note = See specification as filed for detailed description of substitutions and modifications
  source 1..89: mol_type = other RNA

SEQ ID NO: 823 - RNA, 89 nt, synthetic construct; identical to SEQ ID NO: 802
  misc_feature 1..89: note = Synthetic
  misc_feature 1..89: note = See specification as filed for detailed description of substitutions and modifications
  source 1..89: mol_type = other RNA

SEQ ID NO: 824 - RNA, 89 nt, synthetic construct; identical to SEQ ID NO: 802
  misc_feature 1..89: note = Synthetic
  misc_feature 1..89: note = See specification as filed for detailed description of substitutions and modifications
  source 1..89: mol_type = other RNA

SEQ ID NO: 825 - RNA, 89 nt, synthetic construct; identical to SEQ ID NO: 802
  misc_feature 1..89: note = Synthetic
  misc_feature 1..89: note = See specification as filed for detailed description of substitutions and modifications
  source 1..89: mol_type = other RNA

SEQ ID NO: 826 - RNA, 89 nt, synthetic construct; identical to SEQ ID NO: 802
  misc_feature 1..89: note = Synthetic
  misc_feature 1..89: note = See specification as filed for detailed description of substitutions and modifications
  source 1..89: mol_type = other RNA

SEQ ID NO: 827 - RNA, 89 nt, synthetic construct; identical to SEQ ID NO: 802
  misc_feature 1..89: note = Synthetic
  misc_feature 1..89: note = See specification as filed for detailed description of substitutions and modifications
  source 1..89: mol_type = other RNA

SEQ ID NO: 828 - RNA, 89 nt, synthetic construct; identical to SEQ ID NO: 802
  misc_feature 1..89: note = Synthetic
  misc_feature 1..89: note = See specification as filed for detailed description of substitutions and modifications
  source 1..89: mol_type = other RNA

SEQ ID NO: 829 - RNA, 89 nt, synthetic construct; identical to SEQ ID NO: 802
  misc_feature 1..89: note = Synthetic
  misc_feature 1..89: note = See specification as filed for detailed description of substitutions and modifications
  source 1..89: mol_type = other RNA

SEQ ID NO: 830 - RNA, 89 nt, synthetic construct; identical to SEQ ID NO: 802
  misc_feature 1..89: note = Synthetic
  misc_feature 1..89: note = See specification as filed for detailed description of substitutions and modifications
  source 1..89: mol_type = other RNA

SEQ ID NO: 831 - RNA, 89 nt, synthetic construct; identical to SEQ ID NO: 802
  misc_feature 1..89: note = Synthetic
  misc_feature 1..89: note = See specification as filed for detailed description of substitutions and modifications
  source 1..89: mol_type = other RNA

SEQ ID NO: 832 - RNA, 89 nt, synthetic construct; identical to SEQ ID NO: 802
  misc_feature 1..89: note = Synthetic
  misc_feature 1..89: note = See specification as filed for detailed description of substitutions and modifications
  source 1..89: mol_type = other RNA

SEQ ID NO: 833 - RNA, 89 nt, synthetic construct; identical to SEQ ID NO: 802
  misc_feature 1..89: note = Synthetic
  misc_feature 1..89: note = See specification as filed for detailed description of substitutions and modifications
  source 1..89: mol_type = other RNA

SEQ ID NO: 834 - RNA, 89 nt, synthetic construct; identical to SEQ ID NO: 802
  misc_feature 1..89: note = Synthetic
  misc_feature 1..89: note = See specification as filed for detailed description of substitutions and modifications
  source 1..89: mol_type = other RNA

SEQ ID NO: 835 - RNA, 89 nt, synthetic construct; identical to SEQ ID NO: 802
  misc_feature 1..89: note = Synthetic
  misc_feature 1..89: note = See specification as filed for detailed description of substitutions and modifications
  source 1..89: mol_type = other RNA

SEQ ID NO: 836 - RNA, 89 nt, synthetic construct; identical to SEQ ID NO: 802
  misc_feature 1..89: note = Synthetic
  misc_feature 1..89: note = See specification as filed for detailed description of substitutions and modifications
  source 1..89: mol_type = other RNA

SEQ ID NO: 837 - RNA, 89 nt, synthetic construct; identical to SEQ ID NO: 800
  misc_feature 1..89: note = Synthetic
  misc_feature 1..89: note = See specification as filed for detailed description of substitutions and modifications
  source 1..89: mol_type = other RNA

SEQ ID NO: 838 - RNA, 89 nt, synthetic construct; identical to SEQ ID NO: 800
  misc_feature 1..89: note = Synthetic
  misc_feature 1..89: note = See specification as filed for detailed description of substitutions and modifications
  source 1..89: mol_type = other RNA

SEQ ID NO: 839 - RNA, 89 nt, synthetic construct; identical to SEQ ID NO: 800
  misc_feature 1..89: note = Synthetic
  misc_feature 1..89: note = See specification as filed for detailed description of substitutions and modifications
  source 1..89: mol_type = other RNA

SEQ ID NO: 840 - RNA, 89 nt, synthetic construct; identical to SEQ ID NO: 800
  misc_feature 1..89: note = Synthetic
  misc_feature 1..89: note = See specification as filed for detailed description of substitutions and modifications
  source 1..89: mol_type = other RNA

SEQ ID NO: 841 - RNA, 89 nt, synthetic construct; identical to SEQ ID NO: 800
  misc_feature 1..89: note = Synthetic
  misc_feature 1..89: note = See specification as filed for detailed description of substitutions and modifications
  source 1..89: mol_type = other RNA

SEQ ID NO: 842 - RNA, 89 nt, synthetic construct; identical to SEQ ID NO: 800
  misc_feature 1..89: note = Synthetic
  misc_feature 1..89: note = See specification as filed for detailed description of substitutions and modifications
  source 1..89: mol_type = other RNA

SEQ ID NO: 843 - RNA, 89 nt, synthetic construct; identical to SEQ ID NO: 800
  misc_feature 1..89: note = Synthetic
  misc_feature 1..89: note = See specification as filed for detailed description of substitutions and modifications
  source 1..89: mol_type = other RNA

SEQ ID NO: 844 - RNA, 89 nt, synthetic construct; identical to SEQ ID NO: 800
  misc_feature 1..89: note = Synthetic
  misc_feature 1..89: note = See specification as filed for detailed description of substitutions and modifications
  source 1..89: mol_type = other RNA

SEQ ID NO: 845 - RNA, 89 nt, synthetic construct; identical to SEQ ID NO: 800
  misc_feature 1..89: note = Synthetic
  misc_feature 1..89: note = See specification as filed for detailed description of substitutions and modifications
  source 1..89: mol_type = other RNA

SEQ ID NO: 846 - RNA, 89 nt, synthetic construct; identical to SEQ ID NO: 800
  misc_feature 1..89: note = Synthetic
  misc_feature 1..89: note = See specification as filed for detailed description of substitutions and modifications
  source 1..89: mol_type = other RNA

SEQ ID NO: 847 - RNA, 89 nt, synthetic construct; identical to SEQ ID NO: 800
  misc_feature 1..89: note = Synthetic
  misc_feature 1..89: note = See specification as filed for detailed description of substitutions and modifications
  source 1..89: mol_type = other RNA

SEQ ID NO: 848 - RNA, 89 nt, synthetic construct; identical to SEQ ID NO: 800
  misc_feature 1..89: note = Synthetic
  misc_feature 1..89: note = See specification as filed for detailed description of substitutions and modifications
  source 1..89: mol_type = other RNA

SEQ ID NO: 849 - RNA, 89 nt, synthetic construct; identical to SEQ ID NO: 800
  misc_feature 1..89: note = Synthetic
  misc_feature 1..89: note = See specification as filed for detailed description of substitutions and modifications
  source 1..89: mol_type = other RNA

SEQ ID NO: 850 - RNA, 89 nt, synthetic construct; identical to SEQ ID NO: 800
  misc_feature 1..89: note = Synthetic
  misc_feature 1..89: note = See specification as filed for detailed description of substitutions and modifications
  source 1..89: mol_type = other RNA

SEQ ID NO: 851 - RNA, 89 nt, synthetic construct; identical to SEQ ID NO: 800
  misc_feature 1..89: note = Synthetic
  misc_feature 1..89: note = See specification as filed for detailed description of substitutions and modifications
  source 1..89: mol_type = other RNA

SEQ ID NO: 852 - RNA, 89 nt, synthetic construct; identical to SEQ ID NO: 800
  misc_feature 1..89: note = Synthetic
  misc_feature 1..89: note = See specification as filed for detailed description of substitutions and modifications
  source 1..89: mol_type = other RNA

SEQ ID NO: 853 - RNA, 89 nt, synthetic construct; identical to SEQ ID NO: 800
  misc_feature 1..89: note = Synthetic
  misc_feature 1..89: note = See specification as filed for detailed description of substitutions and modifications
  source 1..89: mol_type = other RNA

SEQ ID NO: 854 - RNA, 89 nt, synthetic construct; identical to SEQ ID NO: 801
  misc_feature 1..89: note = Synthetic
  misc_feature 1..89: note = See specification as filed for detailed description of substitutions and modifications
  source 1..89: mol_type = other RNA

SEQ ID NO: 855 - RNA, 89 nt, synthetic construct; identical to SEQ ID NO: 802
  misc_feature 1..89: note = Synthetic
  misc_feature 1..89: note = See specification as filed for detailed description of substitutions and modifications
  source 1..89: mol_type = other RNA

SEQ ID NO: 856 - RNA, 89 nt, synthetic construct; identical to SEQ ID NO: 800
  misc_feature 1..89: note = Synthetic
  misc_feature 1..89: note = See specification as filed for detailed description of substitutions and modifications
  source 1..89: mol_type = other RNA

SEQ ID NO: 857 - RNA, 89 nt, synthetic construct
  misc_feature 1..89: note = Synthetic
  misc_feature 1..89: note = See specification as filed for detailed description of substitutions and modifications
  source 1..89: mol_type = other RNA
cgatgagaaccgttgctacaataaggccgtctgaaaagatgtgccgcaacgctctgcccttaagcttctgcttaagggcatcgtttatt

SEQ ID NO: 858 - RNA, 87 nt, synthetic construct
  misc_feature 1..87: note = Synthetic
  misc_feature 1..87: note = See specification as filed for detailed description of substitutions and modifications
  source 1..87: mol_type = other RNA
cgatgagaaccgttgctacaataaggccgtcgaaagatgtgccgcaacgctctgcccttaagcttctgcttaagggcatcgtttatt

SEQ ID NO: 859 - RNA, 85 nt, synthetic construct
  misc_feature 1..85: note = Synthetic
  misc_feature 1..85: note = See specification as filed for detailed description of substitutions and modifications
  source 1..85: mol_type = other RNA
cgatgagaaccgttgctacaataaggccgtgaaaatgtgccgcaacgctctgcccttaagcttctgcttaagggcatcgtttatt

SEQ ID NO: 860 - RNA, 83 nt, synthetic construct
  misc_feature 1..83: note = Synthetic
  misc_feature 1..83: note = See specification as filed for detailed description of substitutions and modifications
  source 1..83: mol_type = other RNA
cgatgagaaccgttgctacaataaggccggaaatgtgccgcaacgctctgcccttaagcttctgcttaagggcatcgtttatt

SEQ ID NO: 861 - RNA, 81 nt, synthetic construct
  misc_feature 1..81: note = Synthetic
  misc_feature 1..81: note = See specification as filed for detailed description of substitutions and modifications
  source 1..81: mol_type = other RNA
cgatgagaaccgttgctacaataaggccgaaagtgccgcaacgctctgcccttaagcttctgcttaagggcatcgtttatt

SEQ ID NO: 862 - RNA, 87 nt, synthetic construct
  misc_feature 1..87: note = Synthetic
  misc_feature 1..87: note = See specification as filed for detailed description of substitutions and modifications
  source 1..87: mol_type = other RNA
cgatgagaaccgttgctacaataaggccgtctgaaaagatgtgccgcaacgctctgcccttaagttctcttaagggcatcgtttatt

SEQ ID NO: 863 - RNA, 85 nt, synthetic construct
  misc_feature 1..85: note = Synthetic
  misc_feature 1..85: note = See specification as filed for detailed description of substitutions and modifications
  source 1..85: mol_type = other RNA
cgatgagaaccgttgctacaataaggccgtctgaaaagatgtgccgcaacgctctgcccttaattctttaagggcatcgtttatt

SEQ ID NO: 864 - RNA, 83 nt, synthetic construct
  misc_feature 1..83: note = Synthetic
  misc_feature 1..83: note = See specification as filed for detailed description of substitutions and modifications
  source 1..83: mol_type = other RNA
cgatgagaaccgttgctacaataaggccgtctgaaaagatgtgccgcaacgctctgcccttattcttaagggcatcgtttatt

SEQ ID NO: 865 - RNA, 81 nt, synthetic construct
  misc_feature 1..81: note = Synthetic
  misc_feature 1..81: note = See specification as filed for detailed description of substitutions and modifications
  source 1..81: mol_type = other RNA
cgatgagaaccgttgctacaataaggccgtctgaaaagatgtgccgcaacgctctgcccttttctaagggcatcgtttatt

SEQ ID NO: 866 - RNA, 79 nt, synthetic construct
  misc_feature 1..79: note = Synthetic
  misc_feature 1..79: note = See specification as filed for detailed description of substitutions and modifications
  source 1..79: mol_type = other RNA
cgatgagaaccgttgctacaataaggccgtctgaaaagatgtgccgcaacgctctgccctttctagggcatcgtttatt

SEQ ID NO: 867 - RNA, 77 nt, synthetic construct
  misc_feature 1..77: note = Synthetic
  misc_feature 1..77: note = See specification as filed for detailed description of substitutions and modifications
  source 1..77: mol_type = other RNA
cgatgagaaccgttgctacaataaggccgtctgaaaagatgtgccgcaacgctctgcccttctgggcatcgtttatt

SEQ ID NO: 868 - RNA, 75 nt, synthetic construct
  misc_feature 1..75: note = Synthetic
  misc_feature 1..75: note = See specification as filed for detailed description of substitutions and modifications
  source 1..75: mol_type = other RNA
cgatgagaaccgttgctacaataaggccgtctgaaaagatgtgccgcaacgctctgccttctggcatcgtttatt

SEQ ID NO: 869 - RNA, 73 nt, synthetic construct
  misc_feature 1..73: note = Synthetic
  misc_feature 1..73: note = See specification as filed for detailed description of substitutions and modifications
  source 1..73: mol_type = other RNA
cgatgagaaccgttgctacaataaggccgtctgaaaagatgtgccgcaacgctctgcttctgcatcgtttatt

SEQ ID NO: 870 - RNA, 71 nt, synthetic construct
  misc_feature 1..71: note = Synthetic
  misc_feature 1..71: note = See specification as filed for detailed description of substitutions and modifications
  source 1..71: mol_type = other RNA
cgatgagaaccgttgctacaataaggccgtctgaaaagatgtgccgcaacgctctgttctcatcgtttatt

SEQ ID NO: 871 - RNA, 71 nt, synthetic construct
  misc_feature 1..71: note = Synthetic
  misc_feature 1..71: note = See specification as filed for detailed description of substitutions and modifications
  source 1..71: mol_type = other RNA
cgatgagaaccgttgctacaataaggccgtgaaaatgtgccgcaacgctctgccttctggcatcgtttatt

SEQ ID NO: 872 - RNA, 86 nt, synthetic construct
  misc_feature 1..86: note = Synthetic
  misc_feature 1..86: note = See specification as filed for detailed description of substitutions and modifications
  source 1..86: mol_type = other RNA
cgatgagaaccgttgctacaataaggccgtctgaaaagatgtgccgcaacgctctgcccttaagcttctgcttaagggcatcgttt

SEQ ID NO: 873 - RNA, 46 nt, synthetic construct
  misc_feature 1..46: note = Synthetic
  misc_feature 1..46: note = See specification as filed for detailed description of substitutions and modifications
  source 1..46: mol_type = other RNA
actcactcacccacacagacacacgttgtagctccctttctcatcg

SEQ ID NO: 874 - RNA, 46 nt, synthetic construct
  misc_feature 1..46: note = Synthetic
  misc_feature 1..46: note = See specification as filed for detailed description of substitutions and modifications
  source 1..46: mol_type = other RNA
gtgtgtccctctccccacccgtccgttgtagctccctttctcatcg

SEQ ID NO: 875 - RNA, 46 nt, synthetic construct; identical to SEQ ID NO: 874
  misc_feature 1..46: note = Synthetic
  misc_feature 1..46: note = See specification as filed for detailed description of substitutions and modifications
  source 1..46: mol_type = other RNA

SEQ ID NO: 876 - RNA, 46 nt, synthetic construct; identical to SEQ ID NO: 874
  misc_feature 1..46: note = Synthetic
  misc_feature 1..46: note = See specification as filed for detailed description of substitutions and modifications
  source 1..46: mol_type = other RNA

SEQ ID NO: 877 - RNA, 46 nt, synthetic construct; identical to SEQ ID NO: 874
  misc_feature 1..46: note = Synthetic
  misc_feature 1..46: note = See specification as filed for detailed description of substitutions and modifications
  source 1..46: mol_type = other RNA

SEQ ID NO: 878 - RNA, 46 nt, synthetic construct; identical to SEQ ID NO: 874
  misc_feature 1..46: note = Synthetic
  misc_feature 1..46: note = See specification as filed for detailed description of substitutions and modifications
  source 1..46: mol_type = other RNA

SEQ ID NO: 879 - RNA, 88 nt, synthetic construct
  misc_feature 1..88: note = Synthetic
  misc_feature 1..88: note = See specification as filed for detailed description of substitutions and modifications
  source 1..88: mol_type = other RNA
cgatgagaaccgttgctacaataaggccgtctgaaaagatgtgccgcaacgctctgcccttaagcttctgcttaagggcatcgtttat

SEQ ID NO: 880 - RNA, 88 nt, synthetic construct
  misc_feature 1..88: note = Synthetic
  misc_feature 1..88: note = See specification as filed for detailed description of substitutions and modifications
  source 1..88: mol_type = other RNA
cgatgagaaccgttgctacaataaggccgtctgaaaagatgtgccgcaacgctctgcccttaagcgaaagcttaagggcatcgtttat

SEQ ID NO: 881 - RNA, 88 nt, synthetic construct; identical to SEQ ID NO: 879
  misc_feature 1..88: note = Synthetic
  misc_feature 1..88: note = See specification as filed for detailed description of substitutions and modifications
  source 1..88: mol_type = other RNA

SEQ ID NO: 882 - RNA, 88 nt, synthetic construct
  misc_feature 1..88: note = Synthetic
  misc_feature 1..88: note = See specification as filed for detailed description of substitutions and modifications
  source 1..88: mol_type = other RNA
cgatgagaaaggttgctacaataaggccgtctgaaaagatgtgccgcaacgctctgcccttaagcttctgcttaagggcatcgtttat

SEQ ID NO: 883 - RNA, 87 nt, synthetic construct
  misc_feature 1..87: note = Synthetic
  misc_feature 1..87: note = See specification as filed for detailed description of substitutions and modifications
  source 1..87: mol_type = other RNA
cgatgagaaccgttgctacaataaggccgtctgaaaagatgtgccgcaacgctctgcccttaagcttctgcttaagggcatcgtttt

SEQ ID NO: 884 - RNA, 87 nt, synthetic construct; identical to SEQ ID NO: 883
  misc_feature 1..87: note = Synthetic
  misc_feature 1..87: note = See specification as filed for detailed description of substitutions and modifications
  source 1..87: mol_type = other RNA

SEQ ID NO: 885 - RNA, 86 nt, synthetic construct; identical to SEQ ID NO: 872
  misc_feature 1..86: note = Synthetic
  misc_feature 1..86: note = See specification as filed for detailed description of substitutions and modifications
  source 1..86: mol_type = other RNA

SEQ ID NO: 886 - RNA, 88 nt, synthetic construct; identical to SEQ ID NO: 879
  misc_feature 1..88: note = Synthetic
  misc_feature 1..88: note = See specification as filed for detailed description of substitutions and modifications
  source 1..88: mol_type = other RNA

SEQ ID NO: 887 - RNA, 88 nt, synthetic construct; identical to SEQ ID NO: 882
  misc_feature 1..88: note = Synthetic
  misc_feature 1..88: note = See specification as filed for detailed description of substitutions and modifications
  source 1..88: mol_type = other RNA

SEQ ID NO: 888 - RNA, 86 nt, synthetic construct; identical to SEQ ID NO: 872
  misc_feature 1..86: note = Synthetic
  misc_feature 1..86: note = See specification as filed for detailed description of substitutions and modifications
  source 1..86: mol_type = other RNA

SEQ ID NO: 889 - RNA, 73 nt, synthetic construct
  misc_feature 1..73: note = Synthetic
  misc_feature 1..73: note = See specification as filed for detailed description of substitutions and modifications
  source 1..73: mol_type = other RNA
cgatgagaaccgttgctacaataaggccgtcgaaagatgtgccgcaacgctctgcccttctggcatcgtttat

SEQ ID NO: 890 - RNA, 71 nt, synthetic construct
  misc_feature 1..71: note = Synthetic
  misc_feature 1..71: note = See specification as filed for detailed description of substitutions and modifications
  source 1..71: mol_type = other RNA
cgatgagaaccgttgctacaataaggccgtcgaaagatgtgccgcaacgctctgcccttctggcatcgttt

SEQ ID NO: 891 - RNA, 88 nt, synthetic construct; identical to SEQ ID NO: 879
  misc_feature 1..88: note = Synthetic
  misc_feature 1..88: note = See specification as filed for detailed description of substitutions and modifications
  source 1..88: mol_type = other RNA

SEQ ID NO: 892 - RNA, 88 nt, synthetic construct; identical to SEQ ID NO: 879
  misc_feature 1..88: note = Synthetic
  misc_feature 1..88: note = See specification as filed for detailed description of substitutions and modifications
  source 1..88: mol_type = other RNA

SEQ ID NO: 893 - RNA, 88 nt, synthetic construct; identical to SEQ ID NO: 879
  misc_feature 1..88: note = Synthetic
  misc_feature 1..88: note = See specification as filed for detailed description of substitutions and modifications
  source 1..88: mol_type = other RNA

SEQ ID NO: 894 - RNA, 88 nt, synthetic construct; identical to SEQ ID NO: 879
  misc_feature 1..88: note = Synthetic
  misc_feature 1..88: note = See specification as filed for detailed description of substitutions and modifications
  source 1..88: mol_type = other RNA

SEQ ID NO: 895 - RNA, 88 nt, synthetic construct; identical to SEQ ID NO: 879
  misc_feature 1..88: note = Synthetic
  misc_feature 1..88: note = See specification as filed for detailed description of substitutions and modifications
  source 1..88: mol_type = other RNA

SEQ ID NO: 896 - RNA, 88 nt, synthetic construct; identical to SEQ ID NO: 879
  misc_feature 1..88: note = Synthetic
  misc_feature 1..88: note = See specification as filed for detailed description of substitutions and modifications
  source 1..88: mol_type = other RNA

SEQ ID NO: 897 - RNA, 88 nt, synthetic construct; identical to SEQ ID NO: 879
  misc_feature 1..88: note = Synthetic
  misc_feature 1..88: note = See specification as filed for detailed description of substitutions and modifications
  source 1..88: mol_type = other RNA

SEQ ID NO: 898 - RNA, 88 nt, synthetic construct; identical to SEQ ID NO: 879
  misc_feature 1..88: note = Synthetic
  misc_feature 1..88: note = See specification as filed for detailed description of substitutions and modifications
  source 1..88: mol_type = other RNA

SEQ ID NO: 899 - RNA, 88 nt, synthetic construct; identical to SEQ ID NO: 879
  misc_feature 1..88: note = Synthetic
  misc_feature 1..88: note = See specification as filed for detailed description of substitutions and modifications
  source 1..88: mol_type = other RNA

SEQ ID NO: 900 - RNA, 88 nt, synthetic construct; identical to SEQ ID NO: 879
  misc_feature 1..88: note = Synthetic
  misc_feature 1..88: note = See specification as filed for detailed description of substitutions and modifications
  source 1..88: mol_type = other RNA

SEQ ID NO: 901 - RNA, 88 nt, synthetic construct; identical to SEQ ID NO: 879
  misc_feature 1..88: note = Synthetic
  misc_feature 1..88: note = See specification as filed for detailed description of substitutions and modifications
  source 1..88: mol_type = other RNA

SEQ ID NO: 902 - RNA, 88 nt, synthetic construct; identical to SEQ ID NO: 879
  misc_feature 1..88: note = Synthetic
  misc_feature 1..88: note = See specification as filed for detailed description of substitutions and modifications
  source 1..88: mol_type = other RNA

SEQ ID NO: 903 - RNA, 105 nt, synthetic construct; identical to SEQ ID NO: 295
  misc_feature 1..105: note = Synthetic
  misc_feature 1..105: note = See specification as filed for detailed description of substitutions and modifications
  source 1..105: mol_type = other RNA

SEQ ID NO: 904 - RNA, 103 nt, synthetic construct
  misc_feature 1..103: note = Synthetic
  misc_feature 1..103: note = See specification as filed for detailed description of substitutions and modifications
  source 1..103: mol_type = other RNA
ccaagtgtcttccagtacgatttggttgtagctcccttcgaaagaccgttgctacaataaggccgtgaaaatgtgccgcaacgctctgccttctggcatcgtt

SEQ ID NO: 905 - RNA, 101 nt, synthetic construct
  misc_feature 1..101: note = Synthetic
  misc_feature 1..101: note = See specification as filed for detailed description of substitutions and modifications
  source 1..101: mol_type = other RNA
ccaagtgtcttccagtacgatttggttgtagctcccttcgaaagaccgttgctacaataaggccggaaatgtgccgcaacgctctgccttctggcatcgtt

SEQ ID NO: 906 - RNA, 99 nt, synthetic construct
  misc_feature 1..99: note = Synthetic
  misc_feature 1..99: note = See specification as filed for detailed description of substitutions and modifications
  source 1..99: mol_type = other RNA
ccaagtgtcttccagtacgatttggttgtagctcccttcgaaagaccgttgctacaataaggccgaaagtgccgcaacgctctgccttctggcatcgtt

SEQ ID NO: 907 - RNA, 95 nt, synthetic construct
  misc_feature 1..95: note = Synthetic
  misc_feature 1..95: note = See specification as filed for detailed description of substitutions and modifications
  source 1..95: mol_type = other RNA
ccaagtgtcttccagtacgatttggttgtagctccctgaaaccgttgctacaataaggccgaaagtgccgcaacgctctgccttctggcatcgtt

SEQ ID NO: 908 - RNA, 89 nt, synthetic construct
  misc_feature 1..89: note = Synthetic
  misc_feature 1..89: note = See specification as filed for detailed description of substitutions and modifications
  source 1..89: mol_type = other RNA
caagtctgtctgcctattcaccgagttgtagctccctccgttgctacaataaggccgtcgatgtgccgcaacgctctgccggcatcgtt

SEQ ID NO: 909 - RNA, 89 nt, synthetic construct
  misc_feature 1..89: note = Synthetic
  misc_feature 1..89: note = See specification as filed for detailed description of substitutions and modifications
  source 1..89: mol_type = other RNA
ggtgaataggcagacagacttgtcgttgtagctccctccgttgctacaataaggccgtcgatgtgccgcaacgctctgccggcatcgtt

SEQ ID NO: 910 - RNA, 89 nt, synthetic construct
  misc_feature 1..89: note = Synthetic
  misc_feature 1..89: note = See specification as filed for detailed description of substitutions and modifications
  source 1..89: mol_type = other RNA
gattaaacccggccactttcaggagttgtagctccctccgttgctacaataaggccgtcgatgtgccgcaacgctctgccggcatcgtt

SEQ ID NO: 911 - RNA, 89 nt, synthetic construct
  misc_feature 1..89: note = Synthetic
  misc_feature 1..89: note = See specification as filed for detailed description of substitutions and modifications
  source 1..89: mol_type = other RNA
cagtgacaagtctgtctgcctattgttgtagctccctccgttgctacaataaggccgtcgatgtgccgcaacgctctgccggcatcgtt

SEQ ID NO: 912 - RNA, 89 nt, synthetic construct
  misc_feature 1..89: note = Synthetic
  misc_feature 1..89: note = See specification as filed for detailed description of substitutions and modifications
  source 1..89: mol_type = other RNA
gttgaaggcgtttgcacatgcaaagttgtagctccctccgttgctacaataaggccgtcgatgtgccgcaacgctctgccggcatcgtt

SEQ ID NO: 913 - RNA, 89 nt, synthetic construct
  misc_feature 1..89: note = Synthetic
  misc_feature 1..89: note = See specification as filed for detailed description of substitutions and modifications
  source 1..89: mol_type = other RNA
tcctgtgatgtcaagctggtcgaggttgtagctccctccgttgctacaataaggccgtcgatgtgccgcaacgctctgccggcatcgtt

SEQ ID NO: 914 - RNA, 89 nt, synthetic construct
  misc_feature 1..89: note = Synthetic
  misc_feature 1..89: note = See specification as filed for detailed description of substitutions and modifications
  source 1..89: mol_type = other RNA
caggttttgaaagtttaggttcgtgttgtagctccctccgttgctacaataaggccgtcgatgtgccgcaacgctctgccggcatcgtt

SEQ ID NO: 915 - RNA, 89 nt, synthetic construct
  misc_feature 1..89: note = Synthetic
  misc_feature 1..89: note = See specification as filed for detailed description of substitutions and modifications
  source 1..89: mol_type = other RNA
atcagaatccttactttgtgacacgttgtagctccctccgttgctacaataaggccgtcgatgtgccgcaacgctctgccggcatcgtt

SEQ ID NO: 916 - RNA, 89 nt, synthetic construct
  misc_feature 1..89: note = Synthetic
  misc_feature 1..89: note = See specification as filed for detailed description of substitutions and modifications
  source 1..89: mol_type = other RNA
gaagtccatagacctcatgtctaggttgtagctccctccgttgctacaataaggccgtcgatgtgccgcaacgctctgccggcatcgtt

SEQ ID NO: 917 - RNA, 101 nt, synthetic construct
  misc_feature 1..101: note = Synthetic
  misc_feature 1..101: note = See specification as filed for detailed description of substitutions and modifications
  source 1..101: mol_type = other RNA
tgtctgcctattcaccgattttgagttgtagctccctgaaaccgttgctacaataaggccgtcgaaagatgtgccgcaacgctctgccttctggcatcgtt

SEQ ID NO: 918 - RNA, 101 nt, synthetic construct
  misc_feature 1..101: note = Synthetic
  misc_feature 1..101: note = See specification as filed for detailed description of substitutions and modifications
  source 1..101: mol_type = other RNA
tgcctattcaccgattttgattctgttgtagctccctgaaaccgttgctacaataaggccgtcgaaagatgtgccgcaacgctctgccttctggcatcgtt

SEQ ID NO: 919 - RNA, 101 nt, synthetic construct
  misc_feature 1..101: note = Synthetic
  misc_feature 1..101: note = See specification as filed for detailed description of substitutions and modifications
  source 1..101: mol_type = other RNA
cgattttgattctcaaacaaatgtgttgtagctccctgaaaccgttgctacaataaggccgtcgaaagatgtgccgcaacgctctgccttctggcatcgtt

SEQ ID NO: 920 - RNA, 101 nt, synthetic construct
  misc_feature 1..101: note = Synthetic
  misc_feature 1..101: note = See specification as filed for detailed description of substitutions and modifications
  source 1..101: mol_type = other RNA
gtaaggattctgatgtgtatatcagttgtagctccctgaaaccgttgctacaataaggccgtcgaaagatgtgccgcaacgctctgccttctggcatcgtt

SEQ ID NO: 921 - RNA, 101 nt, synthetic construct
  misc_feature 1..101: note = Synthetic
  misc_feature 1..101: note = See specification as filed for detailed description of substitutions and modifications
  source 1..101: mol_type = other RNA
agagcaacagtgctgtggcctggagttgtagctccctgaaaccgttgctacaataaggccgtcgaaagatgtgccgcaacgctctgccttctggcatcgtt

SEQ ID NO: 922 - RNA, 101 nt, synthetic construct
  misc_feature 1..101: note = Synthetic
  misc_feature 1..101: note = See specification as filed for detailed description of substitutions and modifications
  source 1..101: mol_type = other RNA
tggagcaacaaatctgactttgcagttgtagctccctgaaaccgttgctacaataaggccgtcgaaagatgtgccgcaacgctctgccttctggcatcgtt

SEQ ID NO: 923 - RNA, 101 nt, synthetic construct
  misc_feature 1..101: note = Synthetic
  misc_feature 1..101: note = See specification as filed for detailed description of substitutions and modifications
  source 1..101: mol_type = other RNA
atgctgttgttgaaggcgtttgcagttgtagctccctgaaaccgttgctacaataaggccgtcgaaagatgtgccgcaacgctctgccttctggcatcgtt

SEQ ID NO: 924 - RNA, 101 nt, synthetic construct
  misc_feature 1..101: note = Synthetic
  misc_feature 1..101: note = See specification as filed for detailed description of substitutions and modifications
  source 1..101: mol_type = other RNA
ttttgaaagtttaggttcgtatctgttgtagctccctgaaaccgttgctacaataaggccgtcgaaagatgtgccgcaacgctctgccttctggcatcgtt

SEQ ID NO: 925 - RNA, 101 nt, synthetic construct
  misc_feature 1..101: note = Synthetic
  misc_feature 1..101: note = See specification as filed for detailed description of substitutions and modifications
  source 1..101: mol_type = other RNA
ttactttgtgacacatttgtttgagttgtagctccctgaaaccgttgctacaataaggccgtcgaaagatgtgccgcaacgctctgccttctggcatcgtt

SEQ ID NO: 926 - RNA, 101 nt, synthetic construct
  misc_feature 1..101: note = Synthetic
  misc_feature 1..101: note = See specification as filed for detailed description of substitutions and modifications
  source 1..101: mol_type = other RNA
gattaaacccggccactttcaggagttgtagctccctgaaaccgttgctacaataaggccgtcgaaagatgtgccgcaacgctctgccttctggcatcgtt

SEQ ID NO: 927 - RNA, 101 nt, synthetic construct
  misc_feature 1..101: note = Synthetic
  misc_feature 1..101: note = See specification as filed for detailed description of substitutions and modifications
  source 1..101: mol_type = other RNA
atatccagaaccctgaccctgccggttgtagctccctgaaaccgttgctacaataaggccgtcgaaagatgtgccgcaacgctctgccttctggcatcgtt

SEQ ID NO: 928 - RNA, 101 nt, synthetic construct
  misc_feature 1..101: note = Synthetic
  misc_feature 1..101: note = See specification as filed for detailed description of substitutions and modifications
  source 1..101: mol_type = other RNA
aggaccagcctcagacacaaatacgttgtagctccctgaaaccgttgctacaataaggccgtcgaaagatgtgccgcaacgctctgccttctggcatcgtt

SEQ ID NO: 929 - RNA, 101 nt, synthetic construct
  misc_feature 1..101: note = Synthetic
  misc_feature 1..101: note = See specification as filed for detailed description of substitutions and modifications
  source 1..101: mol_type = other RNA
ctgcctcggacggcatctagaactgttgtagctccctgaaaccgttgctacaataaggccgtcgaaagatgtgccgcaacgctctgccttctggcatcgtt

SEQ ID NO: 930 - RNA, 101 nt, synthetic construct
  misc_feature 1..101: note = Synthetic
  misc_feature 1..101: note = See specification as filed for detailed description of substitutions and modifications
  source 1..101: mol_type = other RNA
aggcagaggaggagcagacgatgagttgtagctccctgaaaccgttgctacaataaggccgtcgaaagatgtgccgcaacgctctgccttctggcatcgtt

SEQ ID NO: 931 - RNA, 101 nt, synthetic construct; identical to SEQ ID NO: 214
  misc_feature 1..101: note = Synthetic
  misc_feature 1..101: note = See specification as filed for detailed description of substitutions and modifications
  source 1..101: mol_type = other RNA

SEQ ID NO: 932 - RNA, 101 nt, synthetic construct; identical to SEQ ID NO: 214
  misc_feature 1..101: note = Synthetic
  misc_feature 1..101: note = See specification as filed for detailed description of substitutions and modifications
  source 1..101: mol_type = other RNA

SEQ ID NO: 933 - RNA, 101 nt, synthetic construct; identical to SEQ ID NO: 214
  misc_feature 1..101: note = Synthetic
  misc_feature 1..101: note = See specification as filed for detailed description of substitutions and modifications
  source 1..101: mol_type = other RNA

SEQ ID NO: 934 - RNA, 101 nt, synthetic construct; identical to SEQ ID NO: 214
  misc_feature 1..101: note = Synthetic
  misc_feature 1..101: note = See specification as filed for detailed description of substitutions and modifications
  source 1..101: mol_type = other RNA

SEQ ID NO: 935 - RNA, 101 nt, synthetic construct; identical to SEQ ID NO: 214
  modified_base 54: mod_base = OTHER; note = thymine
  misc_feature 1..101: note = Synthetic
  misc_feature 1..101: note = See specification as filed for detailed description of substitutions and modifications
  source 1..101: mol_type = other RNA

SEQ ID NO: 936 - RNA, 101 nt, synthetic construct; identical to SEQ ID NO: 214
  misc_feature 1..101: note = Synthetic
  misc_feature 1..101: note = See specification as filed for detailed description of substitutions and modifications
  source 1..101: mol_type = other RNA

SEQ ID NO: 937 - RNA, 101 nt, synthetic construct; identical to SEQ ID NO: 214
  misc_feature 1..101: note = Synthetic
  misc_feature 1..101: note = See specification as filed for detailed description of substitutions and modifications
  source 1..101: mol_type = other RNA

SEQ ID NO: 938 - RNA, 101 nt, synthetic construct; identical to SEQ ID NO: 214
  misc_feature 1..101: note = Synthetic
  misc_feature 1..101: note = See specification as filed for detailed description of substitutions and modifications
  source 1..101: mol_type = other RNA

SEQ ID NO: 939 - RNA, 101 nt, synthetic construct; identical to SEQ ID NO: 214
  misc_feature 1..101: note = Synthetic
  misc_feature 1..101: note = See specification as filed for detailed description of substitutions and modifications
  source 1..101: mol_type = other RNA

SEQ ID NO: 940 - RNA, 101 nt, synthetic construct; identical to SEQ ID NO: 214
  misc_feature 1..101: note = Synthetic
  misc_feature 1..101: note = See specification as filed for detailed description of substitutions and modifications
  source 1..101: mol_type = other RNA

SEQ ID NO: 941 - RNA, 101 nt, synthetic construct; identical to SEQ ID NO: 214
  misc_feature 1..101: note = Synthetic
  misc_feature 1..101: note = See specification as filed for detailed description of substitutions and modifications
  source 1..101: mol_type = other RNA

SEQ ID NO: 942 - RNA, 101 nt, synthetic construct; identical to SEQ ID NO: 214
  misc_feature 1..101: note = Synthetic
  misc_feature 1..101: note = See specification as filed for detailed description of substitutions and modifications
  source 1..101: mol_type = other RNA

SEQ ID NO: 943 - RNA, 101 nt, synthetic construct; identical to SEQ ID NO: 214
  misc_feature 1..101: note = Synthetic
  misc_feature 1..101: note = See specification as filed for detailed description of substitutions and modifications
  source 1..101: mol_type = other RNA

SEQ ID NO: 944 - RNA, 101 nt, synthetic construct; identical to SEQ ID NO: 214
  misc_feature 1..101: note = Synthetic
  misc_feature 1..101: note = See specification as filed for detailed description of substitutions and modifications
  source 1..101: mol_type = other RNA

SEQ ID NO: 945 - RNA, 101 nt, synthetic construct; identical to SEQ ID NO: 214
  misc_feature 1..101: note = Synthetic
  misc_feature 1..101: note = See specification as filed for detailed description of substitutions and modifications
  source 1..101: mol_type = other RNA

SEQ ID NO: 946 - RNA, 101 nt, synthetic construct; identical to SEQ ID NO: 214
  misc_feature 1..101: note = Synthetic
  misc_feature 1..101: note = See specification as filed for detailed description of substitutions and modifications
  source 1..101: mol_type = other RNA

SEQ ID NO: 947 - RNA, 101 nt, synthetic construct; identical to SEQ ID NO: 928
  misc_feature 1..101: note = Synthetic
  source 1..101: mol_type = other RNA

SEQ ID NO: 948 - RNA, 101 nt, synthetic construct; identical to SEQ ID NO: 929
  misc_feature 1..101: note = Synthetic
  source 1..101: mol_type = other RNA

SEQ ID NO: 949 - RNA, 101 nt, synthetic construct; identical to SEQ ID NO: 930
  misc_feature 1..101: note = Synthetic
  source 1..101: mol_type = other RNA

SEQ ID NO: 950 - RNA, 10 nt, synthetic construct
  misc_feature 1..10: note = Synthetic
  source 1..10: mol_type = other RNA
ttcgaaagac

SEQ ID NO: 951 - RNA, 101 nt, synthetic construct; identical to SEQ ID NO: 214
  misc_feature 1..101: note = Synthetic
  misc_feature 1..101: note = See specification as filed for detailed description of substitutions and modifications
  source 1..101: mol_type = other RNA

SEQ ID NO: 952 - RNA, 105 nt, synthetic construct; identical to SEQ ID NO: 295
  misc_feature 1..105: note = Synthetic
  misc_feature 1..105: note = See specification as filed for detailed description of substitutions and modifications
  source 1..105: mol_type = other RNA

We claim:

1. A guide RNA (gRNA) comprising a guide region and a conserved region, the conserved region comprising one or more of:
(a) a shortened repeat/anti-repeat region, wherein the shortened repeat/anti-repeat region lacks 2-24 nucleotides, wherein
(i) one or more of nucleotides 37-48 and 53-64 is deleted and optionally one or more of nucleotides 37-64 is substituted relative to SEQ ID NO: 500; and
(ii) nucleotide 36 is linked to nucleotide 65 by at least 2 nucleotides; or
(b) a shortened hairpin 1 region, wherein the shortened hairpin 1 lacks 2-10, optionally 2-8 nucleotides, wherein
(i) one or more of nucleotides 82-86 and 91-95 is deleted and optionally one or more of positions 82-96 is substituted relative to SEQ ID NO: 500; and
(ii) nucleotide 81 is linked to nucleotide 96 by at least 4 nucleotides; or
(c) a shortened hairpin 2 region, wherein the shortened hairpin 2 lacks 2-18, optionally 2-16 nucleotides, wherein
(i) one or more of nucleotides 113-121 and 126-134 is deleted and optionally one or more of nucleotides 113-134 is substituted relative to SEQ ID NO: 500; and
(ii) nucleotide 112 is linked to nucleotide 135 by at least 4 nucleotides;
wherein one or both nucleotides 144-145 are optionally deleted relative to SEQ ID NO: 500;
wherein at least 10 nucleotides are modified nucleotides.

2. The gRNA of claim 1, wherein the gRNA is a single-guide RNA (sgRNA) and wherein the gRNA comprises (a) a shortened repeat/anti-repeat region, wherein the shortened repeat/anti-repeat region lacks 2-24 nucleotides, wherein
(i) one or more of nucleotides 37-48 and 53-64 is deleted and optionally one or more of nucleotides 37-64 is substituted relative to SEQ ID NO: 500; and
(ii) nucleotide 36 is linked to nucleotide 65 by at least 2 nucleotides.

3. The gRNA of claim 1 or 2, wherein the guide region has (i) an insertion of one nucleotide or a deletion of 1-4 nucleotides within positions 1-24 relative to SEQ ID NO: 500, or (ii) a length of 24 nucleotides.

4. The gRNA of claim 3, wherein the guide region has a length of 25, 24, 23, 22, 21, or 20 nucleotides, optionally wherein the guide region has a length of 25, 24, 23, or 22 nucleotides.

5. The gRNA of claim 4, wherein the guide region has a length of 23-24 nucleotides.

6. The gRNA of any one of claims 1-5, wherein the gRNA further comprises a 3′ tail.

7. The gRNA of claim 6, wherein the 3′ tail comprises 1, 2, 3, 4, 5, 6, 7, 8, 9, or 10 nucleotides.

8. The gRNA of claim 7, wherein the 3′ tail comprises 1, 2, 3, 4, or 5 nucleotides.

9. The gRNA of any one of claims 6-8, wherein the 3′ tail terminates with a nucleotide comprising a uracil or modified uracil.

10. The gRNA of any one of claims 6-9, wherein the 3′ tail is 1 nucleotide in length.

11. The gRNA of any one of claims 6-10, wherein the 3′ tail consists of a nucleotide comprising a uracil or a modified uracil.

12. The gRNA of any one of claims 6-11, wherein the 3′ tail comprises a modification of any one or more of the nucleotides present in the 3′ tail.

13. The gRNA of any one of claims 6-12, wherein the modification of the 3′ tail is one or more of 2′-O-methyl (2′-OMe) modified nucleotide and a phosphorothioate (PS) linkage between nucleotides.

14. The gRNA of any one of claims 6-13, wherein the 3′ tail is fully modified.

15. The gRNA of any one of claims 1-14, wherein the 3′ nucleotide of the gRNA is a nucleotide comprising a uracil or a modified uracil.

16. The gRNA of any one of claims 1-5, wherein one or more of nucleotides 144 and 145 are deleted relative to SEQ ID NO: 500.

17. The gRNA of any one of claims 1-5, wherein both nucleotides 144 and 145 are deleted relative to SEQ ID NO: 500.

18. The gRNA of any one of claims 1-5, wherein the gRNA does not comprise a 3′ tail.

19. The gRNA of any one of claims 1-18, wherein the shortened repeat/anti-repeat region lacks 2-24 nucleotides.

20. The gRNA of any one of claims 1-19, wherein the shortened repeat/anti-repeat region has a length of 28, 29, 30, 31, 32, 33, 34, 35, 36, 37, 38, 39, 40, 41, 42, 43, 44, 45, 46, 47, 48, 49, or 50 nucleotides.

21. The gRNA of any one of claims 1-20, wherein the shortened repeat/anti-repeat region lacks 12-24, optionally 18-24 nucleotides, optionally 20-22 nucleotides.

22. The gRNA of any one of claims 1-21, wherein the shortened repeat/anti-repeat region has a length of 28, 29, 30, 31, 32, 33, 34, 35, 36, 37, 38, 39, or 40 nucleotides.

23. The gRNA of any one of claims 1-22, wherein the shortened repeat/anti-repeat region has a length of 28, 29, 30, 31, 32, 33, or 34 nucleotides, or 30, 31, or 32 nucleotides.

24. The gRNA of any one of claims 1-23, wherein nucleotides 37-64 of SEQ ID NO: 500 form the upper stem, and one or more base pairs of the upper stem of the shortened repeat/anti-repeat region are deleted.

25. The gRNA of any one of claims 1-24, wherein the upper stem of the shortened repeat/anti-repeat region comprises no more than one, two, three, or four base pairs.

26. The gRNA of any one of claims 1-25, wherein all of positions 39-48 and all of positions 53-62 of the upper stem of the shortened repeat/anti-repeat region are deleted, and optionally nucleotide 38 or 63 is substituted.

27. The gRNA of any one of claims 1-26, wherein all of positions 38-48 and all of positions 53-63 of the upper stem of the shortened repeat/anti-repeat region are deleted, and optionally nucleotide 37 or 64 is substituted.

28. The gRNA of any one of claims 1-27, wherein all of nucleotides 37-48 and 53-64 of the upper stem of the shortened repeat/anti-repeat region are deleted, and optionally nucleotides 36 or 65 is substituted.

29. The Grna of any one of claims 1-28, wherein the shortened repeat/anti-repeat region has a duplex portion 11 base paired nucleotides in length.

30. The gRNA of any one of claims 1-29, wherein the shortened repeat/anti-repeat region has a single duplex portion.

31. The gRNA of any one of claims 1-29, wherein the shortened repeat/anti-repeat region has a first duplex portion and a second duplex portion.

32. The gRNA of claim 31, wherein the second duplex portion is 2-3 base paired nucleotides in length.

33. The gRNA of claim 31, wherein the first duplex portion is 11 base paired nucleotides in length and the second duplex portion is 3 base paired nucleotides in length.

34. The gRNA of any one of claims 1-33, wherein the upper stem of the shortened repeat/anti-repeat region includes one or more substitutions relative to SEQ ID NO: 500.

35. The gRNA of any one of claims 1-34, wherein one or more of nucleotides 49-52 is substituted relative to SEQ ID NO: 500.

36. The gRNA of any one of claims 1-33, wherein the shortened repeat/anti-repeat region is unsubstituted.

37. The gRNA of any one of claims 1-36, wherein the shortened repeat/anti-repeat region has 12-22 modified nucleotides

38. The gRNA of claim 37, wherein the shortened repeat/anti-repeat region does not comprise a modification at nucleotide 76.

39. The gRNA of claim 37, wherein the shortened repeat/anti-repeat does not comprise a phosphorothioate (PS) modification at nucleotide 76.

40. The gRNA of any one of claims 1-39, wherein the shortened hairpin 1 region lacks 2-10 nucleotides, optionally 2-8 or 2-4 nucleotides.

41. The gRNA of any one of claims 1-40, wherein the shortened hairpin 1 region has a length of 13, 14, 15, 16, 17, 18, 19, 20, or 21 nucleotides.

42. The gRNA of claim any one of claims 1-41, wherein the shortened hairpin 1 region has a duplex portion 4-8, optionally 7-8 base paired nucleotides in length.

43. The gRNA of claim any one of claims 1-41, wherein the shortened hairpin 1 region has a single duplex portion.

44. The gRNA of any one of claims 1-43, wherein one or two base pairs of the shortened hairpin 1 region are deleted.

45. The gRNA of any one of claims 1-44, wherein the stem of the shortened hairpin 1 region is seven or eight base paired nucleotides in length.

46. The gRNA of any one of claims 1-45, wherein one or more of positions 85-86 and one or more of nucleotides 91-92 of the shortened hairpin 1 region are deleted.

47. The gRNA of any one of claims 1-46, wherein nucleotides 86 and 91 or nucleotides 85 and 92 of the shortened hairpin 1 region are deleted.

48. The gRNA of any one of claims 1-47, wherein one or more of nucleotides 82-95 of the shortened hairpin 1 region is substituted relative to SEQ ID NO: 500.

49. The gRNA of any one of claims 1-48, wherein one or more of nucleotides 87-90 is substituted relative to SEQ ID NO: 500.

50. The gRNA of any one of claims 1-48, wherein the shortened hairpin 1 region is unsubstituted.

51. The gRNA of any one of claims 1-49, wherein the shortened hairpin 1 region has 6-15 modified nucleotides.

52. The gRNA of any one of claims 1-50, wherein the shortened hairpin 2 region lacks 2-18, optionally 2-16 nucleotides.

53. The gRNA of any one of claims 1-51, wherein the shortened hairpin 2 region has a length of 24, 25, 26, 27, 28, 29, 30, 31, 32, 33, 34, 35, 36, 37, 38, 39, or 40 nucleotides.

54. The gRNA of any one of claims 1-52, wherein the shortened hairpin 2 region has a length of 28, 29, 30, 31, 32, 33, or 34 nucleotides.

55. The gRNA of any one of claims 1-53, wherein one or more of nucleotides 113-121 and one or more of nucleotides 126-134 of the shortened hairpin 2 region are deleted.

56. The gRNA of any one of claims 1-54, wherein the shortened hairpin 2 region comprises an unpaired region.

57. The gRNA of any one of claims 1-55, wherein the shortened hairpin 2 region has two duplex portions.

58. The gRNA of any one of claims 1-56, wherein the shortened hairpin 2 region has a duplex portion of 4 base paired nucleotides in length.

59. The gRNA of any one of claims 57-58, wherein the shortened hairpin 2 region has a duplex portion of 4-8 base paired nucleotides in length.

60. The gRNA of any one of claims 57-59, wherein the shortened hairpin 2 region has a duplex portion of 4-6 base paired nucleotides in length.

61. The gRNA of any one of claims 1-60, wherein nucleotides 109-138 of SEQ ID NO: 500 form the upper stem, and the upper stem of the shortened hairpin 2 region comprises one, two, three, or four base pairs.

62. The gRNA of any one of claims 1-61, wherein at least one pair of nucleotides 113 and 134, nucleotides 114 and 133, nucleotides 115 and 132, nucleotides 116 and 131, nucleotides 117 and 130, nucleotides 118 and 129, nucleotides 119 and 128, nucleotides 120 and 127, and nucleotides 121 and 126 are deleted.

63. The gRNA of any one of claims 1-62, wherein all of positions 113-121 and 126-134 of the shortened hairpin 2 region are deleted.

64. The gRNA of any one of claims 1-63, wherein one or more of nucleotides 113-134 of the shortened hairpin 2 region is substituted relative to SEQ ID NO: 500.

65. The gRNA of any one of claims 1-64, wherein one or more of nucleotides 122-125 is substituted relative to SEQ ID NO: 500.

66. The gRNA of any one of claims 1-64, wherein the shortened hairpin 2 region is unsubstituted.

67. The gRNA of claim any one of claims 1-66, wherein the shortened hairpin 2 region has 6-15 modified nucleotides.

68. The gRNA of any one of claims 1-67, wherein the guide region of the gRNA comprises at least two modified nucleotides, optionally at least four modified nucleotides.

69. The gRNA of any one of claims 1-68, wherein the guide region of the gRNA comprises 1, 2, 3, 4, 5, 6, 7, 8, 9, 10, 11, or 12 modified nucleotides, optionally 1, 2, or 3 modified nucleotides.

70. The gRNA of any one of claims 1-69, wherein the guide region of the gRNA comprises 4, 5, 6, 7, 8, 9, 10, 11, or 12 modified nucleotides.

71. The gRNA of any one of claims 1-70, wherein the guide region of the gRNA comprises 6, 7, 8, 9, 10, 11, or 12 modified nucleotides.

72. The gRNA of any one of claims 1-71, wherein the guide region does not comprise a modified nucleotide 3′ of the first three nucleotides of the guide region.

73. The gRNA of any one of claims 1-66, wherein the guide region does not comprise a modified nucleotide.

74. The gRNA of any one of claims 1-72, wherein the gRNA comprises a 5′ end modification.

75. The gRNA of any one of claims 1-74, wherein the gRNA comprises a 3′ end modification.

76. The gRNA of any one of claims 1-75, wherein the gRNA comprises a 5′ end modification and a 3′ end modification.

77. The gRNA of any one of claims 1-76, comprising a modification in the upper stem region of the repeat/anti-repeat region.

78. The gRNA of any one of claims 1-77, comprising a modification in the hairpin 1 region.

79. The gRNA of any one of claims 1-78, comprising a modification in the hairpin 2 region.

80. The gRNA of claim 79, wherein the modification in the hairpin 2 region comprises a modification at 1, 2, 3, or 4 nucleotides of nucleotides 106-109.

81. The gRNA of claim 80, wherein the modification in the hairpin 2 region comprises a modification at each of nucleotides 106-109.

82. The gRNA of any one of claim 80 or 81, wherein the modification comprises a 2′-O-methyl (2′-O-Me) modification.

83. The gRNA of any one of claims 1-82, comprising a 3′ end modification, and comprising a modification in the upper stem region of the repeat/anti-repeat region.

84. The gRNA of any one of claims 1-83, comprising a 3′ end modification, and a modification in the hairpin 1 region.

85. The gRNA of any one of claims 1-83, comprising a 3′ end modification, and a modification in the hairpin 2 region.

86. The gRNA of any one of claims 1-85, comprising a 5′ end modification, and comprising a modification in the upper stem region of the repeat/anti-repeat region.

87. The gRNA of any one of claims 1-86, comprising a 5′ end modification, and a modification in the hairpin 1 region.

88. The gRNA of any one of claims 1-87, comprising a 5′ end modification, and a modification in the hairpin 2 region.

89. The gRNA of any one of claims 1-88, comprising a 5′ end modification, a modification in the upper stem region of the repeat/anti-repeat region, and a 3′ end modification.

90. The gRNA of any one of claims 1-89, comprising a 5′ end modification, a modification in the hairpin 1 region, and a 3′ end modification.

91. The gRNA of any one of claims 1-90, comprising a 5′ end modification, a modification in the hairpin 1 region, a modification in the hairpin 2 region, and a 3′ end modification.

92. The gRNA of any one of claims 1-91, comprising a 5′ end modification, a modification in the repeat/anti-repeat region, a modification in the hairpin 1 region, a modification in the hairpin 2 region, and a 3′ end modification.

93. The gRNA of any one of claims 1-92, wherein the modification in the repeat/anti-repeat region does not comprise a phosphorothioate (PS) modification at nucleotide 76.

94. The gRNA of any one of claims 1-93, wherein the modification in the repeat/anti-repeat region does not comprise a modification at nucleotide 76.

95. The gRNA of any one of claims 74-94, wherein the 5′ end modification comprises a modified nucleotide selected from a 2′-O-methyl (2′-OMe) modified nucleotide, 2′-O-(2-methoxyethyl) (2′-O-moe) modified nucleotide, a 2′-fluoro (2′-F) modified nucleotide, a phosphorothioate (PS) linkage between nucleotides, or an inverted abasic modified nucleotide.

96. The gRNA of any one of the claims 74-95, wherein the 3′ end modification comprises a modified nucleotide selected from a 2′-O-methyl (2′-OMe) modified nucleotide, 2′-O-(2-methoxyethyl) (2′-O-moe) modified nucleotide, a 2′-fluoro (2′-F) modified nucleotide, a phosphorothioate (PS) linkage between nucleotides, or an inverted abasic modified nucleotide.

97. The gRNA of any one of the claims 74-96, wherein the 5′ end modification comprises any of:
i. a modification of any one or more of the first 1, 2, 3, or 4 nucleotides;
ii. one modified nucleotide;
iii. two modified nucleotides;
iv. three modified nucleotides; and
v. four modified nucleotides.

98. The gRNA of any one of claims 74-97, wherein the 5′ end modification comprises one or more of:
i. a phosphorothioate (PS) linkage between nucleotides;
ii. a 2′-OMe modified nucleotide;
iii. a 2′-O-moe modified nucleotide;
iv. a 2′-F modified nucleotide; and
v. an inverted abasic modified nucleotide.

99. The gRNA of any one of claims 74-98, wherein the 3′ end modification comprises any of:
i. a modification of any one or more of the last 4, 3, 2, or 1 nucleotides;
ii. one modified nucleotide;
iii. two modified nucleotides;
iv. three modified nucleotides; and
v. four modified nucleotides.

100. The gRNA of any one of claims 74-99, wherein the 3′ end modification comprises one or more of:
i. a phosphorothioate (PS) linkage between nucleotides;
ii. a 2′-OMe modified nucleotide;
iii. a 2′-O-moe modified nucleotide;
iv. a 2′-F modified nucleotide; and
v. an inverted abasic modified nucleotide.

101. The gRNA of any one of claims 74-100, wherein the 5′ end modification comprises at least one PS linkage, and wherein one or more of:
i. there is one PS linkage, and the linkage is between the first and second nucleotides;
ii. there are two PS linkages between the first three nucleotides;
iii. there are PS linkages between any one or more of the first four nucleotides; and
iv. there are PS linkages between any one or more of the first five nucleotides.

102. The gRNA of claim 101, wherein the 5′ end modification further comprises at least one 2′-OMe, 2′-O-moe, inverted abasic, or 2′-F modified nucleotide.

103. The gRNA of any one of claims 1-102, wherein the 5′ end modification comprises:
i. a modification of one or more of the first 1-4 nucleotides, wherein the modification is a PS linkage, inverted abasic nucleotide, 2′-OMe, 2′-O-moe, or 2′-F;
ii. a modification to the first nucleotide with 2′-Ome, 2′-O-moe, or 2′-F, and an optional one or two PS linkages to the next nucleotide or the first nucleotide of the 3′ tail;
iii. a modification to the first or second nucleotide with 2′-Ome, 2′-O-moe, or 2′-F, and optionally one or more PS linkages;
iv. a modification to the first, second, or third nucleotides with 2′-Ome, 2′-O-moe, or 2′-F, and optionally one or more PS linkages; or
v. a modification to the first, second, third, or forth nucleotides with 2′-Ome, 2′-O-moe, or 2′-F, and optionally one or more PS linkages.

104. The gRNA of any one of claims 1-103, wherein the 3′ end modification comprises at least one PS linkage, and wherein one or more of:
vi. there is one PS linkage, and the linkage is between the last and second to last nucleotides;
vii. there are two PS linkages between the last three nucleotides; and
viii. there are PS linkages between any one or more of the last four nucleotides.

105. The gRNA of claim 104, wherein the 3′ end modification further comprises at least one 2′-Ome, 2′-O-moe, inverted abasic, or 2′-F modified nucleotide.

106. The gRNA of any one of claims 1-105, wherein the 3′ end modification comprises:
ix. a modification of one or more of the last 1-4 nucleotides, wherein the modification is a PS linkage, inverted abasic nucleotide, 2′-OMe, 2′-O-moe, or 2′-F;
x. a modification to the last nucleotide with 2′-OMe, 2′-O-moe, or 2′-F, and an optional one or two PS linkages to the next nucleotide or the first nucleotide of the 3′ tail;
xi. a modification to the last or second to last nucleotide with 2′-OMe, 2′-O-moe, or 2′-F, and optionally one or more PS linkages;
xii. a modification to the last, second to last, or third to last nucleotides with 2′-OMe, 2′-O-moe, or 2′-F, and optionally one or more PS linkages; or
xiii. a modification to the last, second to last, third to last, or fourth to last nucleotides with 2′-OMe, 2′-O-moe, or 2′-F, and optionally one or more PS linkages.

107. The gRNA of any one of claims 1-106, wherein the modification in the repeat/anti-repeat region, the hairpin 1 region, or the hairpin 2 region comprises a modified nucleotide selected from 2′-O-methyl (2′-OMe) modified nucleotide, 2′-O-(2-methoxyethyl) (2′-O-moe) modified nucleotide, a 2′-fluoro (2′-F) modified nucleotide, or a phosphorothioate (PS) linkage between nucleotides.

108. The gRNA of any one of claims 1-106, wherein the modification in the repeat/anti-repeat region, the hairpin 1 region, or the hairpin 2 region comprises a modified nucleotide selected from 2′-O-methyl (2′-OMe) modified nucleotide, a 2′-fluoro (2′-F) modified nucleotide, or a phosphorothioate (PS) linkage between nucleotides.

109. The gRNA of any one of claims 1-106, wherein the modification in the repeat/anti-repeat region, the hairpin 1 region, or the hairpin 2 region comprises a modified nucleotide selected from 2′-O-methyl (2′-OMe) modified nucleotide or a phosphorothioate (PS) linkage between nucleotides.

110. The gRNA of any one of claims 1-109, wherein the modification in the repeat/anti-repeat region does not comprise a phosphorothioate modification at nucleotide 76.

111. The gRNA of any one of claims 1-110, wherein the modification in the repeat/anti-repeat region does not comprise a modification at nucleotide 76.

112. The gRNA of any one of claims 1-111, wherein at least 20%, 30%, 40%, or 50% of the nucleotides are modified nucleotides.

113. The gRNA of claim 112, wherein the gRNA comprises modified nucleotides selected from 2′-O-methyl (2′-OMe) modified nucleotide, 2′-O-(2-methoxyethyl) (2′-O-moe) modified nucleotide, a 2′-fluoro (2′-F) modified nucleotide, a phosphorothioate (PS) linkage between nucleotides, or combinations thereof.

114. The gRNA of any one of claims 1-113, wherein the modification comprises a modification at 1, 2, 3, or 4 nucleotides of nucleotides 106-109.

115. The gRNA of any one of claim 113 or 114, wherein the modification comprises a modification at each of nucleotides 106-109.

116. The gRNA of any one of claims 114-115, wherein the modification comprises a 2′-O-methyl modification.

117. The gRNA of any one of claims 112-116, wherein the gRNA comprises modified nucleotides selected from 2′-O-methyl (2′-Ome) modified nucleotide, a 2′-fluoro (2′-F) modified nucleotide, a phosphorothioate (PS) linkage between nucleotides, or combinations thereof.

118. The gRNA of any one of claims 1-117, wherein nucleotides 1-3 of the guide region are modified and nucleotides in the guide region other than nucleotides 1-3 are not modified.

119. The gRNA of any one of claims 1-118, wherein a 3′ tail of nucleotide 144 is present in the gRNA, and comprises 2′-O-Me modified nucleotides at nucleotides 141-144 and two PS linkages between nucleotides 141-142 and 142-143 respectively.

120. The gRNA of any one of claims 1-120, wherein one or more positions of 49-52, 87-90, or 122-125 is substituted.

121. A single guide RNA (sgRNA) comprising any one of SEQ ID NOs: 1-19 and 21-42.

122. The gRNA of any one of claims 1-121, comprising a nucleotide sequence having at least 99, 98, 97, 96, 95, 94, 93, 92, 91, 90, 85, 80, 75, or 70% identity to the nucleotide sequence of any one of SEQ ID Nos: 1-19 and 21-42.

123. The gRNA of any one of claims 1-121, comprising a nucleotide sequence having at least 99, 98, 97, 96, 95, 94, 93, 92, 91, 90, 85, 80, 75, or 70% identity to the nucleotide sequence of any one of SEQ ID Nos: 1-19 and 21-42, wherein the modification at each nucleotide of the gRNA that corresponds to a nucleotide of the reference sequence identifier in Table 1 is identical to or equivalent to the modification shown in the reference sequence identifier in Table 2.

124. The gRNA of any one of claims 1-122, comprising a nucleotide sequence having at least 99, 98, 97, 96, 95, 94, 93, 92, 91, or 90% identity to the sequence from X to the 3′ end of the nucleotide sequence of any one of SEQ ID Nos: 1-5, 7, 8, 11, 12, 13, 15, 16, 18, 19, 21, 23, 24, 26, 27, 28, 30, 31, 33, 34, 35, 37, 39, 41, 101-291, 301-494, 931-946, 951, and 952, where X is the first nucleotide of the conserved region.

125. The gRNA of any one of claims 121-124, further comprising a 3′ tail comprising a 2′-O-Me modified nucleotide.

126. The gRNA of any one of claims 1-125, wherein the gRNA directs a nuclease to a target sequence for binding.

127. The gRNA of any one of claims 1-126, wherein the gRNA directs a nuclease to a target sequence for inducing a double-strand break within the target sequence.

128. The gRNA of any one of claims 1-127, wherein the gRNA directs a nuclease to a target sequence for inducing a single-strand break within the target sequence.

129. The gRNA of any one of claims 126-129, wherein the nuclease is a Nme Cas9.

130. The gRNA of any one of claims 1-129, wherein the gRNA comprises a conservative substitution, optionally wherein the conservative substitution maintains at least one base pair.

131. A composition comprising a gRNA of any one of claims 1-130, associated with a lipid nanoparticle (LNP).

132. An LNP composition comprising a gRNA of any one of claims 1-130.

133. A composition comprising the gRNA of any one of claims 1-130, or the composition of any one of claims 131-132, further comprising a nuclease or an mRNA which encodes the nuclease.

134. The composition of claim 133, wherein the nuclease is a Cas protein.

135. The composition of claim 134, wherein the Cas protein is a Nine Cas9.

136. The composition of claim 135, wherein the Nine Cas9 is an Nme1 Cas9, an Nme2 Cas9, or an Nme3 Cas9.

137. The composition of any one of claims 133-136, wherein the nuclease has a double strand cleaving activity.

138. The composition of any one of claims 133-137, wherein the nuclease has a nickase activity.

139. The composition of any one of claims 133-138, wherein the nuclease has a dCas DNA binding domain.

140. The composition of any one of claims 133-139, wherein the nuclease is modified.

141. The composition of claim 140, wherein the modified nuclease comprises a heterologous functional domain.

142. The composition of claim 141, wherein the heterologous functional domain is a deaminase.

143. The composition of claim 142, further comprising a UGI or a mRNA encoding a UGI.

144. The composition of any one of claims 142-143, wherein the heterologous functional domain is a cytidine deaminase.

145. The composition of any one of claims 140-144, wherein the modified nuclease comprises a nuclear localization signal (NLS).

146. The composition of any one of claims 133-145, comprising an mRNA which encodes the nuclease.

147. The composition of claim 146, wherein the mRNA comprises the sequence of any one of SEQ ID NOs: 636-638.

148. A pharmaceutical formulation comprising the gRNA of any one of claims 1-130 or the composition of any one of claims 131-147 and a pharmaceutically acceptable carrier.

149. A method of modifying a target DNA comprising, delivering a Cas protein or a nucleic acid encoding a Cas protein, and any one or more of the following to a cell:
i. the gRNA of any one of claims 1-130;
ii. the composition of any one of claims 131-147; and
iii. the pharmaceutical formulation of claim 148.

150. The method of claim 149, wherein the method results in an insertion or deletion in a gene.

151. The method of claim 149 or 150, wherein the method results in at least one base edit.

152. The method of any one of claims 149-151, further comprising delivering to the cell a template, wherein at least a part of the template incorporates into a target DNA at or near a double strand break site induced by the Cas protein.

153. The gRNA of any one of claims 1-130, the composition of claims 131-147, or the pharmaceutical formulation of claim 148 for use in preparing a medicament for treating a disease or disorder.

154. Use of the gRNA of any one of claims 1-130, the composition of claims 131-147, or the pharmaceutical formulation of claim 148 in the manufacture of a medicament for treating a disease or disorder.
